(19) United States
(12) Patent Application Publication
(10) Pub. No.: US 2023/0203486 A1
(43) Pub. Date: Jun. 29, 2023

(54) MICROTUBULE ASSOCIATED PROTEIN TAU (MAPT) iRNA AGENT COMPOSITIONS AND METHODS OF USE THEREOF

(71) Applicant: ALNYLAM PHARMACEUTICALS, INC., CAMBRIDGE, MA (US)

(72) Inventors: MANGALA MEENAKSHI SOUNDARAPANDIAN, CAMBRIDGE, MA (US); JAMES D. MCININCH, BURLINGTON, MA (US); ELANE FISHILEVICH, ROCHESTER, MA (US); ADAM CASTORENO, FRAMINGHAM, MA (US); CHARALAMBOS KAITTANIS, CAMBRIDGE, MA (US); MARK K. SCHLEGEL, LEXINGTON, MA (US); JONATHAN EDWARD FARLEY, BOSTON, MA (US); JEFFREY ZUBER, SOMERVILLE, MA (US)

(73) Assignee: ALNYLAM PHARMACEUTICALS, INC., CAMBRIDGE, MA (US)

(21) Appl. No.: 17/995,035

(22) PCT Filed: Mar. 30, 2021
(86) PCT No.: PCT/US2021/024858

§ 371 Date: Sep. 29, 2022

Related U.S. Application Data
(60) Provisional application No. 63/164,467, filed on Mar. 22, 2021.
(60) Provisional application No. 63/002,030, filed on Mar. 30, 2020.

(51) Int. Cl. C12N 15/113

(52) U.S. Cl. CPC C12N 15/113; C12N 2310/14; C12N 2310/312; C12N 2310/315; C12N 2310/3183

(57) ABSTRACT

The disclosure relates to double stranded ribonucleic acid interference (dsRNAi) agents and compositions targeting a microtubule-associated protein tau (MAPT) gene, as well as methods of inhibiting expression of a MAPT gene and methods of treating subjects having a MAPT-associated disease or disorder, e.g., Alzheimer's disease, frontotemporal dementia, progressive supranuclear palsy, or other tauopathies, using such dsRNAi agents and compositions.

### CROSS-REFERENCE TO RELATED APPLICATIONS

[0001] This application claims the benefit of priority to U.S. Provisional Application No. 63/002,030, filed on Mar. 30, 2020, and claims the benefit of U.S. Provisional Application No. 63/164,467, filed on Mar. 22, 2021. The entire contents of the foregoing applications are hereby incorporated herein by reference.

### SEQUENCE LISTING

[0002] The instant application contains a Sequence Listing which has been submitted electronically in ASCII format and are hereby incoroporated by reference in its entirety. The ASCII copy, created on Mar. 24, 2021, is named A108868_1030WO_SL.txt and is 1,018,753 bytes in size.

### BACKGROUND OF THE INVENTION

[0003] The microtubule associated protein tau (MAPT) gene encoding the protein Microtubule-Associated Protein Tau (Mapt), a member of the microtubule-associated protein family, is located in the chromosomal region 17q21.31 (base pairs 45,894,382 to 46,028,334 on chromosome 17). The MAPT gene consists of 16 exons. Alternative mRNA splicing gives rise to six MAPT isoforms with a total of 352-441 amino acids. In three of the six MAPT isoforms, the microtubule-binding domain of MAPT contains three repeated segments, whereas the corresponding domain contains four repeated segments in the other three MAPT isoforms.

[0004] MAPT transcripts are differentially expressed throughout the body, predominantly in the central and peripheral nervous system. Wild type Tau is involved in stabilizing microtubules in neuronal axons, maintaining dendric spines, and regulating axonal transport, microtubule dynamics, and cell division. Pathogenic variants of MAPT are found in approximately 10% of patients with primary tauopathy. Variants are primarily missense mutations and localized in exons 9-13 (microtubule binding domains), with many affecting the alternative splicing of exon 10.

[0005] Tauopathies are a heterogeneous class of progressive neurodegenerative disorders pathologically characterized by the presence of Tau aggregates in the brain. Phenotypically, tauopathies show variable progression of motor, cognitive, and behavioral impairment. Tauopathies include, but are not limited to, Alzheimer's disease, frontotemporal dementia (FTD), and progressive supranuclear palsy (PSP). Tau is a major component of neurofibrillary tangles in the neuronal cytoplasm, a hallmark in Alzheimer's disease. The aggregation and deposition of Tau were also observed in approximately 50% of the brains of patients with Parkinson's disease.

[0006] FTD includes, but is not limited to, behavioral variant frontotemporal dementia (bvFTD), nonfluent variant primary progressive aphasia (nfvPPA), and corticobasal syndrome (CBS).

[0007] There are currently no curative therapies for tauopathies, and treatments are only aimed at alleviating the symptoms and improving the patient's quality of life. Accordingly, there is a need for agents that can selectively and efficiently inhibit or adjust the expression of the MAPT gene such that subjects having a MAPT-associated disorder, e.g., Alzheimer's disease, FTD, PSP, or another tauopathy, can be effectively treated.

### BRIEF SUMMARY OF THE INVENTION

[0008] The present disclosure provides RNAi compositions, which effect the RNA-induced silencing complex (RISC)-mediated cleavage of RNA transcripts of a MAPT gene. The MAPT gene may be within a cell, e.g., a cell within a subject, such as a human. The use of these iRNAs enables the targeted degradation of mRNAs of the corresponding gene (MAPT gene) in mammals.

[0009] The iRNAs of the invention have been designed to target a MAPT gene, e.g., a MAPT gene having a missense and/or deletion mutations in the exons of the gene, and having a combination of nucleotide modifications. The iRNAs of the invention inhibit the expression of the MAPT gene by at least about 25%, at least about 30%, at least about 40%, at least about 50%, at least about 60%, at least about 70%, at least about 80%, at least about 90%, or at least about 95%, relative to control levels, and reduce the level of sense- and antisense-containing foci. Without intending to be limited by theory, it is believed that a combination or sub-combination of the foregoing properties and the specific target sites, or the specific modifications in these iRNAs confer to the iRNAs of the invention improved efficacy, stability, potency, durability, and safety. In one aspect, the present invention provides a double stranded ribonucleic acid (dsRNA) agent for inhibiting expression of MAPT, wherein the dsRNA agent comprises a sense strand and an antisense strand forming a double stranded region, wherein the sense strand comprises at least 15 contiguous nucleotides differing by no more than 3 nucleotides from the nucleotide sequence of SEQ ID NO: 1 or SEQ ID NO: 3, and the antisense strand comprises at least 15 contiguous nucleotides differing by no more than 3 nucleotides from the nucleotide sequence of SEQ ID NO: 2 or SEQ ID NO: 4.

[0010] In another aspect, the present invention provides a dsRNA agent for inhibiting expression of MAPT, wherein the dsRNA agent comprises a sense strand and an antisense strand forming a double stranded region, wherein the antisense strand comprises a region of complementarity to an mRNA encoding Tau, and wherein the region of complementarity comprises at least 15 contiguous nucleotides differing by no more than 3 nucleotides from the nucleotide sequence of SEQ ID NO:2 or SEQ ID NO: 4.

[0011] In yet another aspect, the present invention provides a dsRNA agent for inhibiting expression of MAPT, wherein the dsRNA agent comprises a sense strand and an antisense strand forming a double stranded region, wherein the antisense strand comprises a region of complementarity to an mRNA encoding Tau, and wherein the region of complementarity comprises at least 15 contiguous nucleotides differing by no more than 3 nucleotides from any one of the antisense nucleotide sequences in any one of Tables 3-8 and 16-28.

[0012] In one embodiment, the sense strand comprises at least 15 contiguous nucleotides differing by no more than three nucleotides from any one of the nucleotide sequence of nucleotides 512-532, 513-533, 514-534, 515-535, 516-536, 517-537, 518-538, 519-539, 520-540, 1063-1083, 1067-1087, 1072-1092, 1074-1094, 1075-1095, 1125-1145, 1126-1146, 1127-1147, 1129-1149, 1170-1190, 1395-1415, 1905-1925, 1906-1926, 1909-1929, 1911-1931, 1912-1932, 1913-1933, 1914-1934, 1915-1935, 1916-1936, 1919-1939, 1951-1971, 1954-1974, 1958-1978, 2387-2407, 2409-2429, 2410-2430, 2469-2489, 2471-2491, 2472-2492, 2476-2496, 2477-2497, 2478-2498, 2480-2500, 2481-2501, 2482-2502, 2484-2504, 2762-2782, 2764-2784, 2766-2786, 2767-2787, 2768-2788, 2769-2789, 2819-2839, 2821-2841, 2828-2848, 2943-2963, 2944-2964, 2946-2966, 2947-2967, 3252-3272, 3277-3297, 3280-3300, 3281-3301, 3282-3302, 3284-3304, 3285-3305, 3286-3306, 3331-3351, 3332-3352, 3333-3353, 3334-3354, 3335-3355, 3336-3356, 3338-3358, 3340-3360, 3342-3362, 3343-3363, 3344-3364, 3345-3365, 3346-3366, 3347-3367, 3349-3369, 3350-3370, 3353-3373, 3364-3384, 3366-3386, 3367-3387, 3368-3388, 3369-3389, 3370-3390, 3412-3432, 3414-3434, 3415-3435, 3416-3436, 3417-3437, 3419-3439, 3420-3440, 3424-3444, 3425-3445, 3426-3446, 3427-3447, 3428-3448, 3429-3449, 3430-3450, 3431-3451, 3434-3454, 4132-4152, 4134-4154, 4179-4199, 4182-4202, 4184-4204, 4395-4415, 4425-4445, 4426-4446, 4429-4449, 4469-4489, 4470-4490, 4471-4491, 4472-4492, 4473-4493, 4474-4494, 4569-4589, 4571-4591, 4572-4592, 4596-4616, 4623-4643, 4721-4741, 4722-4742, 4725-4745, 4726-4746, 4766-4786, 4767-4787, 4768-4788, 4769-4789, 4770-4790, 4779-4799, 4805-4825, 4806-4826, 4807-4827, 4808-4828, 4809-4829, 4812-4832, 4813-4833, 4814-4834, 4936-4956, 5072-5092, 5073-5093, 5345-5365, 5346-5366, 5349-5369, 5350-5370, 5351-5371, 5460-5480, 5461-5481, 5463-5483, 5465-5485, 5467-5487, 5468-5488, 5469-5489, 5470-5490, 5471-5491, 5505-5525, 5506-5526, 5507-5527, 5508-5528, 5509-5529, 5511-5531, 5513-5533, 5514-5534, 5541-5561, 5544-5564, 5546-5566, 5547-5567, 5548-5568, 5550-5570, 5551-5571, 5574-5594, 5576-5596, 5614-5634, 521-541, 522-542, 523-543, 524-544, 525-545, 526-546, 527-547, 528-548, 529-549, 530-550, 531-551, 532-552, 533-553, 534-554, 535-555, 536-556, 1034-1054, 1035-1055, 1036-1056, 1037-1057, 1038-1058, 1039-1059, 1040-1060, 1041-1061, 1042-1062, 1043-1063, 1044-1064, 1045-1065, 1046-1066, 1047-1067, 1048-1068, 1049-1069, 1050-1070, 1051-1071, 1052-1072, 1053-1073, 1054-1074, 1062-1082, 1064-1084, 1065-1085, 1066-1086, 1068-1088, 1069-1089, 1070-1090, 1071-1091, 1073-1093, 1076-1096, 1077-1097, 1078-1098, 1079-1099, 1080-1100, 1081-1101, 1082-1102, 1128-1148, 1129-1149, 1130-1150, 1131-1151, 1132-1152, 1133-1153, 1134-1154, 1135-1155, 1136-1156, 1137-1157, 1138-1158, 1139-1159, 1140-1160, 1141-1161, 1142-1162, 1143-1163, 1144-1164, 1145-1165, 1146-1166, 1147-1167, 1148-1168, 975-995, 976-996, 977-997, 978-998, 979-999, 980-1000, 981-1001, 982-1002, 983-1003, 984-1004, 985-1005, 986-1006, 987-1007, 988-1008, 989-1009, 990-1010, 991-1011, 992-1012, 993-1013, 994-1014, 995-1015, 996-1016, 997-1017, 998-1018, 999-1019, 1000-1020, 1001-1021, 1002-1022, 1003-1023, 1004-1024, 1005-1025, 1006-1026, 1007-1027, 1008-1028, 1009-1029, 1010-1030, 1011-1031,1012-1032, 1013-1033,1014-1034, 1015-1035,1016-1036, 1017-1037,1018-1038, 1019-1039, 1020-1040, 1021-1041, 1022-1042, 1023-1043, 1024-1044, 1025-1045, 1026-1046, 1027-1047, 1028-1048, 1029-1049, 1030-1050, 1031-1051, 1032-1052, 1033-1053, 1034-1054, 1035-1055, 1036-1056, 1037-1057, 1038-1058, 1039-1059, 1040-1060, 1041-1061, 1042-1062, 1043-1063 and 1045-1065 of SEQ ID NO: 3, and the antisense strand comprises at least 15 contiguous nucleotides from the corresponding nucleotide sequence of SEQ ID NO: 4.

[0013] In certain embodiments, the antisense polynucleotides disclosed herein are substantially complementary to a fragment of a target MAPT sequence and comprise a contiguous nucleotide sequence which is complementary over its entire length to a fragment of SEQ ID NO: 4 selected from the group of nucleotides, wherein the sense strand comprises at least 15 contiguous nucleotides differing by no more than three nucleotides from any one of the nucleotide sequence of nucleotides 520-541, 520-556, 510-534, 512-536, 516-541, 516-540, 520-544, 524-547, 526-551, 529-556, 532-556, 1065-1089, 1068-1095, 1068-1094, 1075-1100, 1076-1100, 1079-1103, 1123-1147, 1127-1151, 1130-1155, 1903-1934, 1903-1930, 1914-1940, 1949-1975, 2470-2497, 2941-2965, 3275-3302, 3278-3302, 3329-3353, 3333-3357, 3338-3367, 3338-3366, 3348-3390, 3348-3388, 3351-3385, 5507-5562 and 5549-5597 of SEQ ID NO: 3, and the antisense strand comprises at least 15 contiguous nucleotides from the corresponding nucleotide sequence of SEQ ID NO: 4.

[0014] In one embodiment, the sense strand comprises at least 15 contiguous nucleotides differing by no more than three nucleotides from any one of the nucleotide sequence of nucleotides 977-997, 980-1000, 973-993, 988-1008, 987-1007, 972-992, 979-999, 1001-1021, 976-996, 994-1014, 1002-1022, 978-998, 974-994, 520-540, 521-541, 5464-5484, 1813-1833, 2378-2398, 3242-3262, 5442-5462, 1665-1685, 524-544, 5207-5227, 4670-4690, 3420-3440, 3328-3348, 5409-5429, 5439-5459, 4527-4547, 5441-5461, 5410-5430 and 5446-5466 of SEQ ID NO: 1, and the antisense strand comprises at least 15 contiguous nucleotides from the corresponding nucleotide sequence of SEQ ID NO: 2.

[0015] In one embodiment, the antisense strand comprises at least 15 contiguous nucleotides differing by no more than three nucleotides from any one of the antisense strand nucleotide sequences of a duplex selected from the group consisting of AD-523799.1, AD-523802.1, AD-523795.1, AD-523810.1, AD-523809.1, AD-1019331.1, AD-523801.1, AD-523823.1, AD-523798.1, AD-523816.1, AD-523824.1, AD-523800.1, AD-523796.1, AD-535094.1, AD-535094.1, AD-535095.1, AD-538647.1, AD-535922.1, AD-536317.1, AD-536911.1, AD-538626.1, AD-535864.1, AD-523561.1, AD-523565.1, AD-523562.1, AD-526914.1, AD-526394.1, AD-395452.1, AD-525343.1, AD-524274.1, AD-526956.1, AD-526986.1, AD-526296.1, AD-526988.1, AD-526957.1, AD-526993.1, AD-1397070.1, AD-1397070.2, AD-1397071.1, AD-1397071.2, AD-1397072.1, AD-1397072.2, AD-1397073.1, AD-1397073.2, AD-1397074.1, AD-1397074.2, AD-1397075.1, AD-1397075.2, AD-1397076.1, AD-1397076.2, AD-1397077.1, AD-1397077.2, AD-1397078.1, AD-1397078.2, AD-1397250.1, AD-1397251.1, AD-1397252.1, AD-1397253.1, AD-1397254.1, AD-1397255.1, AD-1397256.1, AD-1397257.1, AD-1397258.1, AD-1397259.1, AD-1397260.1, AD-1397261.1, AD-1397262.1, AD-1397263.1, AD-1397264.1, AD-1397265.1, AD-1423242.1, AD-1423243.1, AD-1423244.1, AD-1423245.1, AD-1423246.1, AD-1423247.1, AD-1423248.1, AD-1423249.1, AD-1423250.1, AD-1423251.1, AD-1423252.1, AD-1423253.1, AD-1423254.1, AD-1423255.1, AD-1423256.1, AD-1423257.1, AD-1423258.1, AD-1423259.1, AD-1423260.1, AD-1423261.1, AD-1423262.1, AD-1423263.1, AD-1423264.1, AD-1423265.1, AD-1423266.1, AD-1423267.1, AD-1423268.1, AD-1423269.1, AD-1423270.1, AD-1423271.1, AD-1423272.1, AD-1423273.1, AD-1423274.1, AD-1423275.1, AD-1423276.1, AD-1423277.1, AD-1423278.1, AD-1423279.1, AD-1423280.1, AD-1423281.1, AD-1423282.1, AD-1423283.1, AD-1423284.1, AD-1423285.1, AD-1423286.1, AD-1423287.1, AD-1423288.1, AD-1423289.1, AD-1423290.1, AD-1423291.1, AD-1423292.1, AD-1423293.1, AD-1423294.1, AD-1423295.1, AD-1423296.1, AD-1423297.1, AD-1423298.1, AD-1423299.1, AD-1423300.1, AD-1397266.1, AD-1397266.2, AD-1397267.1, AD-1423301.1, AD-1397268.1, AD-1397268.2, AD-1397269.1, AD-1423302.1, AD-1397270.1, AD-1397270.2, AD-1397271.1, AD-1397271.2, AD-1397272.1, AD-1423303.1, AD-1397273.1, AD-1423304.1, AD-1397274.1, AD-1423305.1, AD-1397275.1, AD-1423306.1, AD-1397276.1, AD-1397277.1, AD-1397277.2, AD-1397278.1, AD-1397279.1, AD-1397280.1, AD-1397281.1, AD-1397282.1, AD-1397283.1, AD-1397284.1, AD-1397285.1, AD-1397286.1, AD-1397287.1, AD-1397079.1, AD-1397079.2, AD-1397288.1, AD-1397289.1, AD-1397290.1, AD-1397080.1, AD-1397080.2, AD-1397291.1, AD-1397292.1, AD-1397293.1, AD-1397294.1, AD-1397081.1, AD-1397081.2, AD-1397295.1, AD-1397082.1, AD-1397082.2, AD-1397083.1, AD-1397083.2, AD-1397296.1, AD-1397297.1, AD-1397298.1, AD-1397299.1, AD-1397300.1, AD-1397301.1, AD-1397302.1, AD-1397084.1, AD-1397085.1, AD-1397086.1, AD-1397303.1, AD-1397087.1, AD-1397087.2, AD-1397304.1, AD-1397305.1, AD-1397306.1, AD-1397307.1, AD-1397308.1, AD-1397309.1, AD-1397310.1, AD-1397311.1, AD-1397312.1, AD-1397313.1, AD-1397314.1, AD-1397315.1, AD-1397316.1, AD-1397317.1, AD-1397318.1, AD-1397319.1, AD-1397320.1, AD-1397321.1, AD-1397322.1, AD-1397088.1, AD-1397089.1, AD-1397090.1, AD-1397091.1, AD-1397092.1, AD-1397093.1, AD-1397094.1, AD-1397095.1, AD-1397096.1, AD-1397097.1, AD-1397098.1, AD-1397099.1, AD-1397101.1, AD-1397102.1, AD-1397103.1, AD-1397104.1, AD-1397105.1, AD-1397106.1, AD-1397107.1, AD-1397108.1, AD-1397109.1, AD-1397110.1, AD-1397111.1, AD-1397112.1, AD-1397113.1, AD-1397114.1, AD-1397115.1, AD-1397116.1, AD-1397117.1, AD-1397118.1, AD-1397119.1, AD-1397120.1, AD-1397121.1, AD-1397122.1, AD-1397123.1, AD-1397124.1, AD-1397125.1, AD-1397126.1, AD-1397127.1, AD-1397128.1, AD-1397129.1, AD-1397130.1, AD-1397131.1, AD-1397132.1, AD-1397133.1, AD-1397134.1, AD-1397135.1, AD-1397136.1, AD-1397137.1, AD-1397138.1, AD-1397139.1, AD-1397140.1, AD-1397141.1, AD-1397142.1, AD-1397143.1, AD-1397144.1, AD-1397145.1, AD-1397146.1, AD-1397147.1, AD-1397148.1, AD-1397149.1, AD-1397150.1, AD-1397151.1, AD-1397152.1, AD-1397153.1, AD-1397154.1, AD-1397155.1, AD-1397156.1, AD-1397157.1, AD-1397158.1, AD-1397159.1, AD-1397160.1, AD-1397161.1, AD-1397162.1, AD-1397163.1, AD-1397164.1, AD-1397165.1, AD-1397166.1, AD-1397167.1, AD-1397168.1, AD-1397169.1, AD-1397170.1, AD-1397171.1, AD-1397172.1, AD-1397173.1, AD-1397174.1, AD-1397175.1, AD-1397176.1, AD-1397177.1, AD-1397178.1, AD-1397179.1, AD-1397180.1, AD-1397181.1, AD-1397182.1, AD-1397183.1, AD-1397184.1, AD-1397185.1, AD-1397186.1, AD-1397187.1, AD-1397188.1, AD-1397189.1, AD-1397190.1, AD-1397191.1, AD-1397192.1, AD-1397193.1, AD-1397194.1, AD-1397195.1, AD-1397196.1, AD-1397197.1, AD-1397198.1, AD-1397199.1, AD-1397200.1, AD-1397201.1, AD-1397202.1, AD-1397203.1, AD-1397204.1, AD-1397205.1, AD-1397206.1, AD-1397207.1, AD-1397208.1, AD-1397209.1, AD-1397210.1, AD-1397211.1, AD-1397212.1, AD-1397213.1, AD-1397214.1, AD-1397215.1, AD-1397216.1, AD-1397217.1, AD-1397218.1, AD-1397219.1, AD-1397220.1, AD-1397221.1, AD-1397222.1, AD-1397223.1, AD-1397224.1, AD-1397225.1, AD-1397226.1, AD-1397227.1, AD-1397228.1, AD-1397229.1, AD-1397230.1, AD-1397231.1, AD-1397232.1, AD-1397233.1, AD-1397234.1, AD-1397235.1, AD-1397236.1, AD-1397237.1, AD-1397238.1, AD-1397239.1, AD-1397240.1, AD-1397241.1, AD-1397242.1, AD-1397243.1, AD-1397244.1, AD-1397245.1, AD-1397246.1, AD-1397247.1, AD-1397248.1, AD-1397249.1, AD-523565.1, AD-1397072.3, AD-1397073.3, AD-1397076.3, AD-1397077.3, AD-1397078.3, AD-1397252.2, AD-1397257.2, AD-1397258.2, AD-1397259.2, AD-1397263.2, AD-1397264.2, AD-1397309.2, AD-64958.114, AD-393758.4, AD-1397080.3, AD-1397293.2, AD-1397294.2, AD-1397081.3, AD-1397083.3, AD-1397298.2, AD-1397299.2, AD-1397084.2, AD-1397085.2, AD-1397087.3, AD-1397306.2, AD-1397307.2, AD-1397308.2, AD-1397088.2, AD-1566238, AD-1566239, AD-1566240, AD-1566241, AD-1566242, AD-1566243, AD-1566244, AD-1566245, AD-1566246, AD-1091965, AD-1566248, AD-1566249, AD-1566250, AD-1091966, AD-1566251, AD-1566252, AD-1566253, AD-1566254, AD-1566255, AD-1566256, AD-1566257, AD-1566258, AD-1566259, AD-692906, AD-1566575, AD-1566576, AD-1566577, AD-1566580, AD-1566581, AD-1566582, AD-1566583, AD-1566584, AD-1566586, AD-1566587, AD-1566588, AD-1566590, AD-1566591, AD-1566634, AD-1566635, AD-1566638, AD-1566639, AD-1566641, AD-1566642, AD-1566643, AD-1566679, AD-1566861, AD-1567153, AD-1567154, AD-1567157, AD-1567159, AD-1567160, AD-1567161, AD-1567164, AD-1567167, AD-1567199, AD-1567202, AD-1567550, AD-1567554, AD-1567784, AD-1567896, AD-1567897, AD-1568105, AD-1568108, AD-1568109, AD-1568139, AD-1568140, AD-1568143, AD-1568144, AD-1568148, AD-1568150, AD-1568151, AD-1568152, AD-1568153, AD-1568154, AD-1568158, AD-1568161, AD-1568172, AD-1568174, AD-1568175, AD-692908, AD-1568176, AD-1569830, AD-1569832, AD-1569834, AD-1569835, AD-1569862, AD-1569872, AD-1569890 and AD-1569892.

[0016] In a particular embodiment, the antisense strand comprises at least 15 contiguous nucleotides differing by no more than three nucleotides from any one of the antisense strand nucleotide sequences of a duplex selected from the group consisting of AD-523799.1, AD-523802.1, AD-523795.1, AD-523810.1, AD-523809.1, AD-1019331.1, AD-523801.1, AD-523823.1, AD-523798.1, AD-523816.1, AD-523824.1, AD-523800.1, AD-523796.1, AD-535094.1, AD-535094.1, AD-535095.1, AD-538647.1, AD-535922.1, AD-536317.1, AD-536911.1, AD-538626.1, AD-535864.1, AD-523561.1, AD-523565.1, AD-523562.1, AD-526914.1, AD-526394.1, AD-395452.1, AD-525343.1, AD-524274.1, AD-526956.1, AD-526986.1, AD-526296.1, AD-526988.1, AD-526957.1 and AD-526993.1. In one embodiment, the antisense strand comprises at least 15 contiguous nucleotides differing by no more than three nucleotides from any one of the antisense strand nucleotide sequences of a duplex selected from the group consisting of AD-523799.1, AD-523802.1, AD-523795.1, AD-523810.1, AD-523809.1, AD-1019331.1, AD-523801.1, AD-523823.1, AD-523798.1, AD-523816.1, AD-523824.1, AD-523800.1 and AD-523796.1.

[0017] In some embodiments, the nucleotide sequence of the sense and antisense strand comprises any one of the sense and antisense strand nucleotide sequences in any one of Tables 3-8 and 16-28.

[0018] In one embodiment, the nucleotide sequence of the sense strand comprises at least 15 contiguous nucleotides corresponding to the MAPT gene exon 10 sense strand sequence set forth in SEQ ID NO: 1533 and an antisense strand comprising a sequence complementary thereto.

[0019] In one aspect, the present invention provides a dsRNA agent for inhibiting expression of MAPT, wherein the dsRNA agent comprises a sense strand and an antisense strand forming a double stranded region, wherein the sense strand comprises at least 15 contiguous nucleotides differing by no more than 3 nucleotides from the nucleotide sequence of SEQ ID NO: 5 and the antisense strand comprises at least 15 contiguous nucleotides differing by no more than 3 nucleotides from the nucleotide sequence of SEQ ID NO: 6.

[0020] In another aspect, the present invention provides a dsRNA agent for inhibiting expression of MAPT, wherein the dsRNA agent comprises a sense strand and an antisense strand forming a double stranded region, wherein the antisense strand comprises a region of complementarity to an mRNA encoding Tau, and wherein the region of complementarity comprises at least 15 contiguous nucleotides differing by no more than 3 nucleotides from the nucleotide sequence of SEQ ID NO:6.

[0021] In yet another aspect, the present invention provides a dsRNA agent for inhibiting expression of MAPT, wherein the dsRNA agent comprises a sense strand and an antisense strand forming a double stranded region, wherein the antisense strand comprises a region of complementarity to an mRNA encoding Tau, and wherein the region of complementarity comprises at least 15 contiguous nucleotides differing by no more than 3 nucleotides from any one of the antisense nucleotide sequences in any one of Tables 12-13.

[0022] In one embodiment, the sense strand comprises at least 15 contiguous nucleotides differing by no more than three nucleotides from any one of the nucleotide sequence of nucleotides 1065-1085, 1195-1215, 1066-1086, 1068-1088, 705-725, 1067-1087, 4520-4540, 3341-3361, 4515-4535, 5284-5304, 5285-5305, 344-364, 5283-5303, 5354-5374, 2459-2479, 1061-1081, 706-726, 972-992, 4564-4584, 995-1015, 4546-4566, 968-988, 1127-1147, 4534-4554, 158-178, 4494-4514, 1691-1711, 3544-3564, 198-218, 979-999, 4548-4568, 4551-4571, 543-563, 715-735, 542-562, 352-372, 362-382, 4556-4576, 4547-4567, 4542-4562, 4558-4578, 4549-4569, 5074-5094, 4552-4572, 5073-5093, 5076-5096, 4550-4570 and 2753-2773 of SEQ ID NO: 5, and the antisense strand comprises at least 15 contiguous nucleotides from the corresponding nucleotide sequence of SEQ ID NO: 6.

[0023] In one embodiment, the antisense strand comprises at least 15 contiguous nucleotides differing by no more than three nucleotides from any one of the antisense strand nucleotide sequences of a duplex selected from the group consisting of AD-393758.1, AD-393888.1, AD-393759.1, AD-393761.1, AD-393495.1, AD-393760.1, AD-396425.1, AD-395441.1, AD-396420.1, AD-397103.1, AD-397104.1, AD-393239.1, AD-397102.1, AD-397167.1, AD-394791.1, AD-393754.1, AD-393496.1, AD-393667.1, AD-396467.1, AD-393690.1, AD-396449.1, AD-393663.1, AD-393820.1, AD-396437.1, AD-393084.1, AD-396401.1, AD-394296.1, AD-395574.1, AD-393124.1, AD-393674.1, AD-396451.1, AD-396454.1, AD-393376.1, AD-393505.1, AD-393375.1, AD-393247.1, AD-393257.1, AD-396459.1, AD-396450.1, AD-396445.1, AD-396461.1, AD-396452.1, AD-396913.1, AD-396455.1, AD-396912.1, AD-396915.1, AD-396453.1 and AD-394991.1.

[0024] In one embodiment, the sense strand, the antisense strand, or both the sense strand and the antisense strand described herein, is/are conjugated to one or more lipophilic moieties.

[0025] In one embodiment, the lipophilic moiety is conjugated to one or more internal positions in the double stranded region of the dsRNA agent.

[0026] In one embodiment, the lipophilic moiety is conjugated via a linker or carrier.

[0027] In one embodiment, the lipophilicity of the lipophilic moiety, measured by logKow, exceeds 0.

[0028] In one embodiment, the hydrophobicity of the double-stranded RNA agent, measured by the unbound fraction in a plasma protein binding assay of the double-stranded RNA agent, exceeds 0.2.

[0029] In one embodiment, the plasma protein binding assay is an electrophoretic mobility shift assay using human serum albumin protein.

[0030] In some embodiments, the dsRNA agent comprises at least one modified nucleotide.

[0031] In one embodiment, no more than five of the sense strand nucleotides and no more than five of the nucleotides of the antisense strand in a dsRNA agent of the present invention are unmodified nucleotides.

[0032] In one embodiment, all of the nucleotides of the sense strand and all of the nucleotides of the antisense strand in the dsRNA agent are modified nucleotides.

[0033] In some embodiments, at least one of the modified nucleotides of the dsRNA agent is selected from the group consisting of a deoxy-nucleotide, a 3′-terminal deoxythimidine (dT) nucleotide, a 2′-O-methyl modified nucleotide, a 2′-fluoro modified nucleotide, a 2′-deoxy-modified nucleotide, a locked nucleotide, an unlocked nucleotide, a conformationally restricted nucleotide, a constrained ethyl nucleotide, an abasic nucleotide, a 2′-amino-modified nucleotide, a 2′-O-allyl-modified nucleotide, 2′-C-alkyl-modified nucleotide, 2′-hydroxly-modified nucleotide, a 2′-methoxyethyl modified nucleotide, a 2′-O-alkyl-modified nucleotide, a morpholino nucleotide, a phosphoramidate, a non-natural base comprising nucleotide, a tetrahydropyran modified nucleotide, a 1,5-anhydrohexitol modified nucleotide, a cyclohexenyl modified nucleotide, a nucleotide comprising a 5′-phosphorothioate group, a nucleotide comprising a 5′-methylphosphonate group, a nucleotide comprising a 5′ phosphate or 5′ phosphate mimic, a nucleotide comprising vinyl phosphonate, a nucleotide comprising adenosine-glycol nucleic acid (GNA), a nucleotide comprising thymidine-glycol nucleic acid (GNA) S-Isomer, a nucleotide comprising 2-hydroxymethyl-tetrahydrofurane-5-phosphate, a nucleotide comprising 2′-deoxythymidine-3′phosphate, a nucleotide comprising 2′-deoxyguanosine-3′-phosphate, and a terminal nucleotide linked to a cholesteryl derivative and a dodecanoic acid bisdecylamide group; and combinations thereof.

[0034] In one embodiment, the modified nucleotide of the dsRNA agent is selected from the group consisting of a 2′-deoxy-2′-fluoro modified nucleotide, a 2′-deoxy-modified nucleotide, 3′-terminal deoxythimidine nucleotides (dT), a locked nucleotide, an abasic nucleotide, a 2′-amino-modified nucleotide, a 2′-alkyl-modified nucleotide, a morpholino nucleotide, a phosphoramidate, and a non-natural base comprising nucleotide.

[0035] In one embodiment, the modified nucleotide of the dsRNA comprises a short sequence of 3′-terminal deoxythimidine nucleotides (dT).

[0036] In one embodiment, the modifications on the nucleotides of the dsRNA agent are 2′-O-methyl, GNA and 2′fluoro modifications.

[0037] In some embodiments, the dsRNA agent further comprises at least one phosphorothioate internucleotide linkage.

[0038] In one embodiment, the dsRNA agent comprises 6-8 phosphorothioate internucleotide linkages.

[0039] In one embodiment, each strand of the dsRNA is no more than 30 nucleotides in length.

[0040] In one embodiment, at least one strand of the dsRNA agent comprises a 3′ overhang of at least 1 nucleotide. In another embodiment, at least one strand of the dsRNA agent comprises a 3′ overhang of at least 2 nucleotides.

[0041] In some embodiments, the double stranded region of the dsRNA agent may be 15-30 nucleotide pairs in length; 17-23 nucleotide pairs in length; 17-25 nucleotide pairs in length; 23-27 nucleotide pairs in length; 19-21 nucleotide pairs in length; or 21-23 nucleotide pairs in length.

[0042] In some embodiments, each strand of the dsRNA may have 19-30 nucleotides; 19-23 nucleotides; or 21-23 nucleotides.

[0043] In one embodiment, one or more lipophilic moieties are conjugated to one or more internal positions on at least one strand, such as via a linker or carrier.

[0044] In one embodiment, the internal positions include all positions except the terminal two positions from each end of the at least one strand.

[0045] In another embodiment, the internal positions include all positions except the terminal three positions from each end of the at least one strand.

[0046] In one embodiment, the internal positions exclude a cleavage site region of the sense strand.

[0047] In one embodiment, the internal positions include all positions except positions 9-12, counting from the 5′-end of the sense strand.

[0048] In another embodiment, the internal positions include all positions except positions 11-13, counting from the 3′-end of the sense strand.

[0049] In one embodiment, the internal positions exclude a cleavage site region of the antisense strand.

[0050] In one embodiment, the internal positions include all positions except positions 12-14, counting from the 5′-end of the antisense strand.

[0051] In one embodiment, the internal positions include all positions except positions 11-13 on the sense strand, counting from the 3′-end, and positions 12-14 on the antisense strand, counting from the 5′-end.

[0052] In one embodiment, the one or more lipophilic moieties are conjugated to one or more of the internal positions selected from the group consisting of positions 4-8 and 13-18 on the sense strand, and positions 6-10 and 15-18 on the antisense strand, counting from the 5′end of each strand.

[0053] In another embodiment, the one or more lipophilic moieties are conjugated to one or more of the internal positions selected from the group consisting of positions 5, 6, 7, 15, and 17 on the sense strand, and positions 15 and 17 on the antisense strand, counting from the 5′-end of each strand.

[0054] In one embodiment, the internal positions in the double stranded region exclude a cleavage site region of the sense strand.

[0055] In one embodiment, the sense strand is 21 nucleotides in length, the antisense strand is 23 nucleotides in length, and the lipophilic moiety is conjugated to position 21, position 20, position 15, position 1, position 7, position 6, or position 2 of the sense strand or position 16 of the antisense strand.

[0056] In one embodiment, the lipophilic moiety is conjugated to position 21, position 20, position 15, position 1, or position 7 of the sense strand.

[0057] In another embodiment, the lipophilic moiety is conjugated to position 21, position 20, or position 15 of the sense strand.

[0058] In yet another embodiment, the lipophilic moiety is conjugated to position 20 or position 15 of the sense strand.

[0059] In one embodiment, the lipophilic moiety is conjugated to position 16 of the antisense strand.

[0060] In one embodiment, the lipophilic moiety is an aliphatic, alicyclic, or polyalicyclic compound.

[0061] In one embodiment, the lipophilic moiety is selected from the group consisting of lipid, cholesterol, retinoic acid, cholic acid, adamantane acetic acid, 1-pyrene butyric acid, dihydrotestosterone, 1,3-bis-O(hexadecyl)glycerol, geranyloxyhexyanol, hexadecylglycerol, borneol, menthol, 1,3-propanediol, heptadecyl group, palmitic acid, myristic acid, O3-(oleoyl) lithocholic acid, O3-(oleoyl)cholenic acid, dimethoxytrityl, or phenoxazine.

[0062] In one embodiment, the lipophilic moiety contains a saturated or unsaturated C4-C30 hydrocarbon chain, and an optional functional group selected from the group consisting of hydroxyl, amine, carboxylic acid, sulfonate, phosphate, thiol, azide, and alkyne.

[0063] In one embodiment, the lipophilic moiety contains a saturated or unsaturated C6-C18 hydrocarbon chain.

[0064] In one embodiment, the lipophilic moiety contains a saturated or unsaturated C16 hydrocarbon chain.

[0065] In one embodiment, the saturated or unsaturated C16 hydrocarbon chain is conjugated to position 6, counting from the 5′-end of the strand.

[0066] In one embodiment, the lipophilic moiety is conjugated via a carrier that replaces one or more nucleotide(s) in the internal position(s) or the double stranded region.

[0067] In one embodiment, the carrier is a cyclic group selected from the group consisting of pyrrolidinyl, pyrazolinyl, pyrazolidinyl, imidazolinyl, imidazolidinyl, piperidinyl, piperazinyl, [1,3]dioxolanyl, oxazolidinyl, isoxazolidinyl, morpholinyl, thiazolidinyl, isothiazolidinyl, quinoxalinyl, pyridazinonyl, tetrahydrofuranyl, and decalinyl; or is an acyclic moiety based on a serinol backbone or a diethanolamine backbone.

[0068] In one embodiment, the lipophilic moiety is conjugated to the double-stranded iRNA agent via a linker containing an ether, thioether, urea, carbonate, amine, amide, maleimide-thioether, disulfide, phosphodiester, sulfonamide linkage, a product of a click reaction, or carbamate.

[0069] In one embodiment, the lipophilic moiety is conjugated to a nucleobase, sugar moiety, or internucleosidic linkage.

[0070] In one embodiment, the lipophilic moiety or targeting ligand is conjugated via a bio-linker selected from the group consisting of DNA, RNA, disulfide, amide, functionalized monosaccharides or oligosaccharides of galactosamine, glucosamine, glucose, galactose, mannose, and combinations thereof.

[0071] In one embodiment, the 3′ end of the sense strand is protected via an end cap which is a cyclic group having an amine, said cyclic group being selected from the group consisting of pyrrolidinyl, pyrazolinyl, pyrazolidinyl, imidazolinyl, imidazolidinyl, piperidinyl, piperazinyl, [1,3]dioxolanyl, oxazolidinyl, isoxazolidinyl, morpholinyl, thiazolidinyl, isothiazolidinyl, quinoxalinyl, pyridazinonyl, tetrahydrofuranyl, and decalinyl.

[0072] In one embodiment, the dsRNA agent further comprises a targeting ligand that targets a neuronal cell.

[0073] In one embodiment, the dsRNA agent further comprises a targeting ligand that targets a liver cell.

[0074] In one embodiment, the targeting ligand is a GalNAc conjugate.

[0075] In one embodiment, the dsRNA agent further comprises a terminal, chiral modification occurring at the first internucleotide linkage at the 3′ end of the antisense strand, having the linkage phosphorus atom in Sp configuration, a terminal, chiral modification occurring at the first internucleotide linkage at the 5′ end of the antisense strand, having the linkage phosphorus atom in Rp configuration, and

a terminal, chiral modification occurring at the first internucleotide linkage at the 5′ end of the sense strand, having the linkage phosphorus atom in either Rp configuration or Sp configuration.

[0076] In another embodiment, the dsRNA agent further comprises a terminal, chiral modification occurring at the first and second internucleotide linkages at the 3′ end of the antisense strand, having the linkage phosphorus atom in Sp configuration, a terminal, chiral modification occurring at the first internucleotide linkage at the 5′ end of the antisense strand, having the linkage phosphorus atom in Rp configuration, and a terminal, chiral modification occurring at the first internucleotide linkage at the 5′ end of the sense strand, having the linkage phosphorus atom in either Rp or Sp configuration.

[0077] In yet another embodiment, the dsRNA agent further comprises a terminal, chiral modification occurring at the first, second and third internucleotide linkages at the 3′ end of the antisense strand, having the linkage phosphorus atom in Sp configuration, a terminal, chiral modification occurring at the first internucleotide linkage at the 5′ end of the antisense strand, having the linkage phosphorus atom in Rp configuration, and a terminal, chiral modification occurring at the first internucleotide linkage at the 5′ end of the sense strand, having the linkage phosphorus atom in either Rp or Sp configuration.

[0078] In another embodiment, the dsRNA agent further comprises a terminal, chiral modification occurring at the first, and second internucleotide linkages at the 3′ end of the antisense strand, having the linkage phosphorus atom in Sp configuration, a terminal, chiral modification occurring at the third internucleotide linkages at the 3′ end of the antisense strand, having the linkage phosphorus atom in Rp configuration, a terminal, chiral modification occurring at the first internucleotide linkage at the 5′ end of the antisense strand, having the linkage phosphorus atom in Rp configuration, and a terminal, chiral modification occurring at the first internucleotide linkage at the 5′ end of the sense strand, having the linkage phosphorus atom in either Rp or Sp configuration.

[0079] In another embodiment, the dsRNA agent further comprises a terminal, chiral modification occurring at the first, and second internucleotide linkages at the 3′ end of the antisense strand, having the linkage phosphorus atom in Sp configuration, a terminal, chiral modification occurring at the first, and second internucleotide linkages at the 5′ end of the antisense strand, having the linkage phosphorus atom in Rp configuration, and a terminal, chiral modification occurring at the first internucleotide linkage at the 5′ end of the sense strand, having the linkage phosphorus atom in either Rp or Sp configuration.

[0080] In one embodiment, the dsRNA agent further comprises a phosphate or phosphate mimic at the 5′-end of the antisense strand.

[0081] In one embodiment, the phosphate mimic is a 5′-vinyl phosphonate (VP).

[0082] In one embodiment, the base pair at the 1 position of the 5′-end of the antisense strand of the duplex is an AU base pair.

[0083] In one embodiment, the sense strand has a total of 21 nucleotides and the antisense strand has a total of 23 nucleotides.

[0084] The present invention also provides cells and pharmaceutical compositions comprising a dsRNA agent of the invention and a lipid formulation.

[0085] The present invention also provides pharmaceutical compositions for inhibiting expression of a gene encoding MAPT comprising a dsRNA agent of the invention.

[0086] The present invention also provides pharmaceutical compositions for selective inhibition of exon 10-containing MAPT transcripts comprising a dsRNA agent of the invention.

[0087] In one embodiment, the dsRNA agent is in an unbuffered solution, such as saline or water.

[0088] In another embodiment, the dsRNA agent is in a buffer solution, such as a buffer solution comprising acetate, citrate, prolamine, carbonate, or phosphate or any combination thereof; or phosphate buffered saline (PBS).

[0089] In one aspect, the present invention provides a method of inhibiting expression of a MAPT gene in a cell, the method comprising contacting the cell with a dsRNA agent of the invention, or a pharmaceutical composition of the invention, thereby inhibiting expression of the MAPT gene in the cell.

[0090] In another aspect, the present invention provides a method comprises selective inhibition of exon 10-containing MAPT transcripts in a cell, the method comprising contacting the cell with a dsRNA agent of the invention, or a pharmaceutical composition of the invention, thereby selectively degrading exon 10-containing MAPT transcripts in the cell.

[0091] In one embodiment, the cell is within a subject.

[0092] In one embodiment, the subject is a human.

[0093] In one embodiment, the subject has a MAPT-associated disorder.

[0094] In one embodiment, the subject has a MAPT-associated disorder that is a neurodegenerative disorder.

[0095] In one embodiment, the neurodegenerative disorder of the subject is associated with an abnormality of MAPT gene encoded protein Tau.

[0096] In one embodiment, the abnormality of MAPT gene encoded protein Tau results in aggregation of Tau in subject's brain.

[0097] In one embodiment, the neurodegenerative disorder is a familial disorder.

[0098] In one embodiment, the neurodegenerative disorder is a sporadic disorder.

[0099] In one embodiment, the MAPT-associated disorder is selected from the group consisting of tauopathy, Alzheimer disease, frontotemporal dementia (FTD), behavioral variant frontotemporal dementia (bvFTD), nonfluent variant primary progressive aphasia (nfvPPA), primary progressive aphasia-semantic (PPA-S), primary progressive aphasia-logopenic (PPA-L), frontotemporal dementia with parkinsonism linked to chromosome 17 (FTDP-17), Pick's disease (PiD), argyrophilic grain disease (AGD), multiple system tauopathy with presenile dementia (MSTD), white matter tauopathy with globular glial inclusions (FTLD with GGIs), FTLD with MAPT mutations, neurofibrillary tangle (NFT) dementia, FTD with motor neuron disease, amyotrophic lateral sclerosis (ALS), corticobasal syndrome (CBS), corticobasal degeneration (CBD), progressive supranuclear palsy (PSP), Parkinson's disease, postencephalitic Parkinsonism, Niemann-Pick disease, Huntington disease, type 1 myotonic dystrophy, and Down syndrome (DS).

[0100] In some embodiments, contacting the cell with the dsRNA agent inhibits the expression of MAPT by at least about 25%, at least about 30%, at least about 40%, at least about 50%, at least about 60%, at least about 70%, at least about 80%, at least about 90%, or at least about 95%, relative to control levels. In one embodiment, the dsRNA agent inhibits the expression of MAPT by at least about 25%.

[0101] In some embodiments, inhibiting expression of MAPT decreases Tau protein level in serum of the subject by at least about 25%, at least about 30%, at least about 40%, at least about 50%, at least about 60%, at least about 70%, at least about 80%, at least about 90%, or at least about 95%, relative to control levels. In one embodiment, the dsRNA agent decreases Tau protein level in serum of the subject by at least about 25%.

[0102] In one aspect, the present invention provides a method of treating a subject having a disorder that would benefit from reduction in MAPT expression, comprising administering to the subject a therapeutically effective amount of a dsRNA agent of the invention, or a pharmaceutical composition of the invention, thereby treating the subject having the disorder that would benefit from reduction in MAPT expression.

[0103] In another aspect, the present invention provides a method of preventing at least one symptom in a subject having a disorder that would benefit from reduction in MAPT expression, comprising administering to the subject a prophylactically effective amount of a dsRNA agent of the invention, or a pharmaceutical composition of the invention, thereby preventing at least one symptom in the subject having the disorder that would benefit from reduction in MAPT expression.

[0104] In one embodiment, the disorder is a MAPT-associated disorder.

[0105] In one embodiment, the disorder is associated with an abnormality of MAPT gene encoded protein Tau.

[0106] In one embodiment, the abnormality of MAPT gene encoded protein Tau results in aggregation of Tau in subject's brain.

[0107] In one embodiment, the MAPT-associated disorder is selected from the group consisting of tauopathy, Alzheimer disease, frontotemporal dementia (FTD), behavioral variant frontotemporal dementia (bvFTD), nonfluent variant primary progressive aphasia (nfvPPA), primary progressive aphasia-semantic (PPA-S), primary progressive aphasia-logopenic (PPA-L), frontotemporal dementia with parkinsonism linked to chromosome 17 (FTDP-17), Pick's disease (PiD), argyrophilic grain disease (AGD), multiple system tauopathy with presenile dementia (MSTD), white matter tauopathy with globular glial inclusions (FTLD with GGIs), FTLD with MAPT mutations, neurofibrillary tangle (NFT) dementia, FTD with motor neuron disease, amyotrophic lateral sclerosis (ALS), corticobasal syndrome (CBS), corticobasal degeneration (CBD), progressive supranuclear palsy (PSP), Parkinson's disease, postencephalitic Parkinsonism, Niemann-Pick disease, Huntington disease, type 1 myotonic dystrophy, and Down syndrome (DS).

[0108] In one embodiment, the subject is human.

[0109] In one embodiment, the administration of the dsRNA agent of the invention, or the pharmaceutical composition of the invention, causes a decrease in Tau aggregation in the subject's brain.

[0110] In one embodiment, the administration of the agent to the subject causes a decrease in Tau accumulation.

[0111] In one embodiment, the dsRNA agent is administered to the subject at a dose of about 0.01 mg/kg to about 50 mg/kg.

[0112] In another embodiment, the dsRNA agent is administered to the subject intrathecally.

[0113] In yet another embodiment, the dsRNA agent is administered to the subject intracisternally. A non-limiting exemplary intracisternal administration comprises an injection into the cisterna magna (cerebellomedullary cistern) by suboccipital puncture.

[0114] In one embodiment, the methods of the invention further comprise determining the level of MAPT in a sample(s) from the subject.

[0115] In one embodiment, the level of MAPT in the subject sample(s) is a Tau protein level in a blood, serum, or cerebrospinal fluid sample(s).

[0116] In one embodiment, the methods of the invention further comprise administering to the subject an additional therapeutic agent.

[0117] In one aspect, the present invention provides a kit comprising a dsRNA agent of the invention, or a pharmaceutical composition of the invention.

[0118] In another aspect, the present invention provides a vial comprising a dsRNA agent of the invention, or a pharmaceutical composition of the invention.

[0119] In yet another aspect, the present invention provides a syringe comprising a dsRNA agent of the invention, or a pharmaceutical composition of the invention.

[0120] In another aspect, the present invention provides an intrathecal pump comprising a dsRNA agent of the invention, or a pharmaceutical composition of the invention.

### BRIEF SUMMARY OF THE FIGURE

[0121] FIG. 1 shows theAAV screen in liver to determine the effect of RNAi compositions on MAPT expression. Vertical axis indicates human MAPT expression in mice dosed with RNAi compositions relative to the MAPT expression levels in PBS dosed mice.

[0122] FIG. 2 shows the AAV screen in liver to determine the effect of selected dsRNA agents in Tables 25-26 on the level of both sense- or antisense-containing foci in mice expressing human MAPT RNAs. Vertical axis indicates human MAPT expression in mice dosed with RNAi compositions relative to the MAPT expression levels in PBS dosed mice.

[0123] FIG. 3 shows the AAV screen in liver to determine the effect of selected dsRNA agents in Tables 25-26 on the level of both sense- or antisense-containing foci in mice expressing human MAPT RNAs. Vertical axis indicates human MAPT expression in mice dosed with RNAi compositions relative to the MAPT expression levels in PBS dosed mice.

### DETAILED DESCRIPTION OF THE INVENTION

[0124] The present disclosure provides RNAi compositions, which effect the RNA-induced silencing complex (RISC)-mediated cleavage of RNA transcripts of a MAPT gene. The MAPT gene may be within a cell, e.g., a cell within a subject, such as a human. The use of these iRNAs enables the targeted degradation of mRNAs of the corresponding gene (MAPT gene) in mammals.

[0125] The iRNAs of the invention have been designed to target a MAPT gene, e.g., a MAPT gene either with or without nucleotide modifications. The iRNAs of the invention inhibit the expression of the MAPT gene by at least about 25%, and reduce the level of sense- and antisense-containing foci. Without intending to be limited by theory, it is believed that a combination or sub-combination of the foregoing properties and the specific target sites, or the specific modifications in these iRNAs confer to the iRNAs of the invention improved efficacy, stability, potency, durability, and safety.

[0126] Accordingly, the present disclosure also provides methods of using the RNAi compositions of the disclosure for inhibiting the expression of a MAPT gene or for treating a subject having a disorder that would benefit from inhibiting or reducing the expression of a MAPT gene, e.g., a MAPT-associated disease, for example, Alzheimer's disease, FTD, PSP, or another tauopathy.

[0127] The RNAi agents of the disclosure include an RNA strand (the antisense strand) having a region which is about 30 nucleotides or less in length, e.g., 15-30, 15-29, 15-28, 15-27, 15-26, 15-25, 15-24, 15-23, 15-22, 15-21, 15-20, 15-19, 15-18, 15-17, 18-30, 18-29, 18-28, 18-27, 18-26, 18-25, 18-24, 18-23, 18-22, 18-21, 18-20, 19-30, 19-29, 19-28, 19-27, 19-26, 19-25, 19-24, 19-23, 19-22, 19-21, 19-20, 20-30, 20-29, 20-28, 20-27, 20-26, 20-25, 20-24,20-23, 20-22, 20-21, 21-30, 21-29, 21-28, 21-27, 21-26, 21-25, 21-24, 21-23, or 21-22 nucleotides in length, which region is substantially complementary to at least part of an mRNA transcript of a MAPT gene, e.g., an MAPT exon. In certain embodiments, the RNAi agents of the disclosure include an RNA strand (the antisense strand) having a region which is about 21-23 nucleotides in length, which region is substantially complementary to at least part of an mRNA transcript of a MAPT gene.

[0128] In certain embodiments, the RNAi agents of the disclosure include an RNA strand (the antisense strand) which can include longer lengths, for example up to 66 nucleotides, e.g., 36-66, 26-36, 25-36, 31-60, 22-43, 27-53 nucleotides in length with a region of at least 19 contiguous nucleotides that is substantially complementary to at least a part of an mRNA transcript of a MAPT gene. These RNAi agents with the longer length antisense strands preferably include a second RNA strand (the sense strand) of 20-60 nucleotides in length wherein the sense and antisense strands form a duplex of 18-30 contiguous nucleotides.

[0129] The use of these RNAi agents enables the targeted degradation and/or inhibition of mRNAs of a MAPT gene in mammals. Thus, methods and compositions including these RNAi agents are useful for treating a subject who would benefit by a reduction in the levels or activity of a Tau, such as a subject having a MAPT-associated disease, such as Alzheimer's disease, FTD, PSP, or another tauopathy.

[0130] The following detailed description discloses how to make and use compositions containing RNAi agents to inhibit the expression of a MAPT gene, as well as compositions and methods for treating subjects having diseases and disorders that would benefit from inhibition or reduction of the expression of the genes.

### I. Definitions

[0131] In order that the present disclosure may be more readily understood, certain terms are first defined. In addition, it should be noted that whenever a value or range of values of a parameter are recited, it is intended that values and ranges intermediate to the recited values are also intended to be part of this disclosure.

[0132] The articles “a” and “an” are used herein to refer to one or to more than one (i.e., to at least one) of the grammatical object of the article. By way of example, “an element” means one element or more than one element, e.g., a plurality of elements.

[0133] The term “including” is used herein to mean, and is used interchangeably with, the phrase “including but not limited to.” The term “or” is used herein to mean, and is used interchangeably with, the term “and/or,” unless context clearly indicates otherwise.

[0134] The term “about” is used herein to mean within the typical ranges of tolerances in the art. For example, “about” can be understood as about 2 standard deviations from the mean. In certain embodiments, about means ±10%. In certain embodiments, about means ±5%. When about is present before a series of numbers or a range, it is understood that “about” can modify each of the numbers in the series or range.

[0135] The term “at least” prior to a number or series of numbers is understood to include the number adjacent to the term “at least”, and all subsequent numbers or integers that could logically be included, as clear from context. For example, the number of nucleotides in a nucleic acid molecule must be an integer. For example, “at least 18 nucleotides of a 21 nucleotide nucleic acid molecule” means that 18, 19, 20, or 21 nucleotides have the indicated property. When at least is present before a series of numbers or a range, it is understood that “at least” can modify each of the numbers in the series or range.

[0136] As used herein, “no more than” or “less than” is understood as the value adjacent to the phrase and logical lower values or integers, as logical from context, to zero. For example, a duplex with an overhang of “no more than 2 nucleotides” has a 2, 1, or 0 nucleotide overhang. When “no more than” is present before a series of numbers or a range, it is understood that “no more than” can modify each of the numbers in the series or range.

[0137] As used herein, the term “at least about”, when referring to a measurable value such as a parameter, an amount, and the like, is meant to encompass variations of +/−20%, preferably +/−10%, more preferably +1-5%, and still more preferably +/−1% from the specified value, insofar such variations are appropriate to perform in the disclosed invention. For example, the inhibition of expression of the MAPT gene by “at least about 25%” means that the inhibition of expression of the MAPT gene can be measured to be any value +/−20% of the specified 25%, i.e., 20%, 30% or any intermediary value between 20-30%.

[0138] As used herein, “control level” refers to the levels of expression of a gene, or expression level of an RNA molecule or expression level of one or more proteins or protein subunits, in a non-modulated cell, tissue or a system identical to the cell, tissue or a system where the RNAi agents, described herein, are expressed. The cell, tissue or a system where the RNAi agents are expressed, have at least 5%, 10%, 20%, 30%, 40%, 50%, 60%, 70%, 80%, 90%, 100%, 2-fold, 3-fold, 4-fold, 5-fold or more expression of the gene, RNA and/or protein described above from that observed in the absence of the RNAi agent. The % and/or fold difference can be calculated relative to the control levels, for example,

$$\% difference = \frac{[ expression with RNAi agent - expression without RNAi agent ]}{expression without RNAi agent} \times 100$$

[0139] As used herein, methods of detection can include determination that the amount of analyte present is below the level of detection of the method.

[0140] In the event of a conflict between an indicated target site and the nucleotide sequence for a sense or antisense strand, the indicated sequence takes precedence.

[0141] In the event of a conflict between a chemical structure and a chemical name, the chemical structure takes precedence.

[0142] The term “MAPT” gene, also known as “DDPAC,” “FTDP-17,” “MAPTL,” “MSTD,” “MTBT1,” “MTBT2,” “PPND,” “PPP1R103,” “TAU,” and “microtubule-associated protein tau,” refers to the gene encoding for a protein called microtubule-associated protein tau (MAPT).

[0143] The MAPT mRNA is expressed throughout the body, predominantly in the central nervous system (i.e., the brain and the spinal cord) and the peripheral nervous system. Wild type Tau is involved in stabilizing microtubules in neuronal axons, regulating axonal transport and microtubule dynamics, maintaining dendric spines, and contributing to genomic DNA integrity.

[0144] Tauopathies are a heterogeneous class of progressive neurodegenerative disorders pathologically characterized by the presence of Tau aggregates in the brain. Intra- and extra-cellular neuronal Tau aggregates cause microtubule disassembly and axonal degeneration, impaired synaptic vesicle release, and prion-like inter-neuronal spread of tau aggregates called “seeding.”

[0145] Phenotypically, tauopathies show variable progression of motor, cognitive, and behavioral impairment. Tauopathies include, but are not limited to, Alzheimer's disease, the most common form of presenile dementia that primarily starts with selective memory impairment, and is associated with degeneration of the frontal lobe, temporal lobe (including hippocampus), and parietal lobe of the brain; frontotemporal dementia (FTD), the second most common form of presenile dementia associated with neuronal atrophy of the frontal and temporal lobes, exhibiting a spectrum of behavioral, language, and movement disorders; and progressive supranuclear palsy (PSP), degeneration of brainstem and basal ganglia, exhibiting gaze dysfunction, extrapyramidal symptoms (Parkinsonism symptoms including limb apraxia, akinesia/bradykinesia, rigidity, and dystonia), and cognitive dysfunction, affecting approximately 20,000 people in the United States.

[0146] FTD further includes, but are not limited to, behavioral variant frontotemporal dementia (bvFTD), associated pathologically with progressive atrophy in the prefrontal and anterior temporal lobes, and clinically with alterations in complex thinking, personality, and behavior, affecting approximately 30,000 people in the United states; primary progressive aphasia-semantic (PPA-S), degeneration of frontal and temporal lobes associated with difficulty comprehending words and struggle with naming; nonfluent variant primary progressive aphasia (nfvPPA), involving degeneration of left post frontal lobe and insula, and exhibiting poor grammar and inability to understand complex sentences, affecting approximately 1,000 people in the United States; primary progressive aphasia-logopenic (PPA-L), degeneration of the left post/spur temporal lobe and the medial parietal lobe, associated with difficulty retrieving words and frequent pauses; frontotemporal dementia with parkinsonism linked to chromosome 17 (FTDP-17), associated pathologically with degeneration of the frontal and temporal lobes, and clinically with speech and movement impairment; Pick's disease (PiD), degeneration of the frontal and temporal lobes, associated with difficulty in language and thinking and behavioral changes; FTD with motor neuron disease, involving degeneration of the cortex and motor neurons; and corticobasal syndrome (CBS), degeneration of posterior frontal and temporal lobes and basal ganglia [i.e., corticobasal degeneration (CBD)], exhibiting extrapyramidal symptoms (similar to those in Parkinson's disease and PSP) and cognitive dysfunction, affecting approximately 2,000 people in the United States. Mutations of MAPT are reported in approximately 10% of patients with bvFTD, nfvPPA, CBS, and PSP, respectively. MAPT is a major component of neurofibrillary tangles in the neuronal cytoplasm, a hallmark in Alzheimer's disease. The aggregation and deposition of MAPT were also observed in approximately 50% of the brains of patients with Parkinson's disease. Involvement of Tau is indicated in the pathogenesis of other diseases including, but not limited to, argyrophilic grain disease (AGD), multiple system tauopathy with presenile dementia (MSTD), white matter tauopathy with globular glial inclusions (FTLD with GGIs), FTLD with MAPT mutations, neurofibrillary tangle (NFT) dementia, FTD with motor neuron disease, amyotrophic lateral sclerosis (ALS), postencephalitic Parkinsonism, Niemann-Pick disease, Huntington disease, type 1 myotonic dystrophy, and Down syndrome (DS).

[0147] The MAPT gene consists of 16 exons (E1-E16). Alternative mRNA splicing of E2, E3, and E10 gives rise to six tau isoforms (352-441 amino acids). E1, E4, E5, E7, E9, E11, E12, E13 are the constitutively spliced exons. E6 and E8 are not transcribed in human brain. E4a is only expressed in the peripheral nervous system. E0 (part of the promotor) and E14 are noncoding exons.

[0148] Pathogenic variants in MAPT are found in approximately 10% of patients with primary tauopathy. Variants are primarily missense and localized in exons 9-13 (microtubule binding domains), with many affecting the alternative splicing of exon 10. Examples of coding region mutations include R5H and R5L in E1; K257T, 1260V, L266V, G272V, and G273R in E9; N279K, L284L, ΔN296, N296N, N296H, ΔN298, P301L, P301S, P301T, G303V, G304S, S305I, S305N, and S305S in E10; L315R, K317M, S320F, P332S in E11; G335S, G335V, Q336R, V337M, E342V, S352L, S356T, V363I, P364S, G366R, and K369I in E12; G389R, R406W, and T427M in E13 of the MAPT gene. MAPT (tau) null (−/−) humans are likely non-viable. The MAPT heterozygote (+/−) humans have unclear or unknown phenotypes. The MAPT over-expressing (+/+/+) humans are associated with early onset dementia, FTD, PSP, and CBD.

[0149] Each of the six isoforms of the MAPT (tau) protein contains three or four repeated segments (R1, R2, R3, and R4) in its microtubule-binding domain. Each repeat is 31 or 32 amino acids in length. Splicing of E9, E10, E11, and E12 gives rise to the R1, R2, R3, and R4, respectively, of the repeated segments in the MAPT's microtubule-binding domain. Three MAPT (tau) isoforms, in which E10 is spliced in, contain four repeated segments (4R), whereas the other three MAPT isoforms, in which E10 is spliced out, contain three repeated segments (3R).

[0150] Translation of E2 and E3 give rise to the N1 and N2 segments, respectively. Alternative splicing of E2 and E3 gives rise to tau isoforms 0N (E2 and E3 are spliced out, resulting in no N segment), 1N (E2 is spliced in and E3 is spliced out, resulting in one N segment), and 2N (E2 and E3 are spliced in, resulting in two N segments). Accordingly, the six MAPT (tau) isoforms resulting from alternative splicing are 2N4R, 1N4R, 0N4R, 2N3R, 1N3R, and 0N3R.

[0151] In healthy individuals, the 3R and 4R MAPT transcript isoforms exist in 1:1 ratio. The 3R/4R isoform ratio is skewed in disease states and the ratio predicts the tau aggregate type. The assembly of four-repeat tau into filaments is characteristic of PSP, CBD, argyrophilic grain disease (AGD), multiple system tauopathy with presenile dementia (MSTD), and white matter tauopathy with globular glial inclusions (FTD with GGIs), which belong to the FTD spectrum (4R tauopathy). In contrast, in Pick's disease, three-repeat tau predominates in the neuronal inclusions (3R tauopathy). In Alzheimer's disease, or other neurodegenerative diseases with neurofibrillary tangles (NFT dementia), both three- and four-repeat tau isoforms make up the neurofibrillary lesions (3/4R tauopathy). FTLD with MAPT mutations can be 3R, 4R, or 3/4R tauopathy.

[0152] FTD with motor neuron disease is associated with the FTLD-TDP43 and FTLD-FUS pathology. It is associated with gene mutations of C90RF72, FUS, TARDBP, and VCP.

[0153] bvFTD is associated with the FTLD-Tau (3R) and FTLD-TDP43 pathology. Ten percent of the cases involve MAPT mutation. It is associated with gene mutations of C90RF72, GRN, and VCP.

[0154] PPA-S may be sporadic. It is associated with the FTLD-TDP43 pathology.

[0155] nfvPPA is associated with the FTLD-Tau (4R), Alzheimer's disease, and FTLD-TDP43 pathology, in the order of significance. Ten percent of the cases involve MAPT mutation, nfvPPA is further associated with mutations of GRN.

[0156] PPA-L may be sporadic. It is associated with the Alzheimer's disease and FTLD-Tau pathology, in the order of significance.

[0157] CBS is associated with the FTLD-Tau (4R) and Alzheimer's disease pathology, in the order of significance. Ten percent of the case is associated with MAPT mutation. The rest of the cases may be sporadic.

[0158] PSP involves FTLD-Tau (4R) pathology. Ten percent of the case is associated with MAPT mutation. The rest of the cases may be sporadic.

[0159] Tauopathy generally starts at age 60-80 years, and affects the remaining lifespan of 6-10 years. Tauopathies are phenotypically heterogeneous, with variable involvement of motor, cognitive, and behavioral impairment. In particular, progression of motor symptoms is variable.

[0160] There are currently no approved disease-modifying therapies for tauopathies. Available treatments are only aimed at alleviating the symptoms and improving the patient's quality of life as the disease progresses. Drugs in preclinical or clinical development include active and passive immunotherapies; inhibitors of O-deglycosylation, aggregation, kinases, acetylation, caspases or tau expression; phosphatase activators; microtubule stabilizers; and modulators of autophagy or proteosomal degradation. Biomarkers and testing used in clinical trials to assess tauopathy include tau protein phosphorylated at threonine 181 (pTau), total tau protein (tTau), neurofilament light chain (NfL), and volumetric MRI (vMRI).

[0161] Exemplary nucleotide and amino acid sequences of MAPT can be found, for example, at GenBank Accession No. NM_016841.4 (Homo sapiens MAPT variant 4, SEQ ID NO: 1, reverse complement, SEQ ID NO: 2); GenBank Accession No. NM_005910 (Homo sapiens MAPT variant 2, SEQ ID NO: 3, reverse complement, SEQ ID NO: 4); GenBank Accession No. NM_001038609.2 (Mus musculus MAPT, SEQ ID NO: 5; reverse complement, SEQ ID NO: 6); GenBank Accession No.: XM_005584540.1 (Macaca fascicularis MAPT variant X13, SEQ ID NO: 7, reverse complement, SEQ ID NO: 8); GenBank Accession No.: XM_008768277.2 (Rattus norvegicus MAPT, variant X7, SEQ ID NO: 9, reverse complement, SEQ ID NO: 10) and GenBank Accession No.: XM_005624183.3 (Canis lupus MAPT variant X23, SEQ ID NO: 11, reverse complement, SEQ ID NO: 12).

[0162] The nucleotide sequence of the genomic region of human chromosome harboring the MAPT gene may be found in, for example, the Genome Reference Consortium Human Build 38 (also referred to as Human Genome build 38 or GRCh38) available at GenBank. The nucleotide sequence of the genomic region of human chromosome 17 harboring the MAPT gene may also be found at, for example, GenBank Accession No. NC_000017.11, corresponding to nucleotides 45894382-46028334 of human chromosome 17. The nucleotide sequence of the human MAPT gene may be found in, for example, GenBank Accession No. NG_007398.2

[0163] Further examples of MAPT sequences can be found in publically available databases, for example, GenBank, OMIM, and UniProt.

[0164] Additional information on MAPT can be found, for example, at the NCBI web site that refers to gene 100128977. The term MAPT as used herein also refers to variations of the MAPT gene including variants provided in the clinical variant database, for example, at the NCBI clinical variants web site that refers to the term mapt.

[0165] The entire contents of each of the foregoing GenBank Accession numbers and the Gene database numbers are incorporated herein by reference as of the date of filing this application.

[0166] As used herein, “target sequence” refers to a contiguous portion of the nucleotide sequence of an mRNA molecule formed during the transcription of a MAPT gene, including mRNA that is a product of RNA processing of a primary transcription product (e.g., MAPT mRNA resulting from alternate splicing). In one embodiment, the target portion of the sequence will be at least long enough to serve as a substrate for RNAi-directed cleavage at or near that portion of the nucleotide sequence of an mRNA molecule formed during the transcription of a MAPT gene.

[0167] The target sequence is about 15-30 nucleotides in length. For example, the target sequence can be from about 15-30 nucleotides, 15-29, 15-28, 15-27, 15-26, 15-25, 15-24, 15-23, 15-22, 15-21, 15-20, 15-19, 15-18, 15-17, 18-30, 18-29, 18-28, 18-27, 18-26, 18-25, 18-24, 18-23, 18-22, 18-21, 18-20, 19-30, 19-29, 19-28, 19-27, 19-26, 19-25, 19-24, 19-23, 19-22, 19-21, 19-20, 20-30, 20-29, 20-28, 20-27, 20-26, 20-25, 20-24,20-23, 20-22, 20-21, 21-30, 21-29, 21-28, 21-27, 21-26, 21-25, 21-24, 21-23, or 21-22 nucleotides in length. In certain embodiments, the target sequence is 19-23 nucleotides in length, optionally 21-23 nucleotides in length. Ranges and lengths intermediate to the above recited ranges and lengths are also contemplated to be part of the disclosure.

[0168] As used herein, the term “strand comprising a sequence” refers to an oligonucleotide comprising a chain of nucleotides that is described by the sequence referred to using the standard nucleotide nomenclature. “G,” “C,” “A,” ‘T’, and “U” each generally stand for a nucleotide that contains guanine, cytosine, adenine, thymidine, and uracil as a base, respectively in the context of a modified or unmodified nucleotide. However, it will be understood that the term “ribonucleotide” or “nucleotide” can also refer to a modified nucleotide, as further detailed below, or a surrogate replacement moiety (see, e.g., Table 1). The skilled person is well aware that guanine, cytosine, adenine, thymidine, and uracil can be replaced by other moieties without substantially altering the base pairing properties of an oligonucleotide comprising a nucleotide bearing such replacement moiety. For example, without limitation, a nucleotide comprising inosine as its base can base pair with nucleotides containing adenine, cytosine, or uracil. Hence, nucleotides containing uracil, guanine, or adenine can be replaced in the nucleotide sequences of dsRNA featured in the disclosure by a nucleotide containing, for example, inosine. In another example, adenine and cytosine anywhere in the oligonucleotide can be replaced with guanine and uracil, respectively to form G-U Wobble base pairing with the target mRNA. Sequences containing such replacement moieties are suitable for the compositions and methods featured in the disclosure.

[0169] The terms “iRNA”, “RNAi agent,” “iRNA agent,” “RNA interference agent” as used interchangeably herein, refer to an agent that contains RNA as that term is defined herein, and which mediates the targeted cleavage of an RNA transcript via an RNA-induced silencing complex (RISC) pathway. RNA interference (RNAi) is a process that directs the sequence-specific degradation of mRNA. RNAi modulates, e.g., inhibits, the expression of MAPT in a cell, e.g., a cell within a subject, such as a mammalian subject.

[0170] In one embodiment, an RNAi agent of the disclosure includes a single stranded RNAi that interacts with a target RNA sequence, e.g., a MAPT target mRNA sequence, to direct the cleavage of the target RNA. Without wishing to be bound by theory it is believed that long double stranded RNA introduced into cells is broken down into double-stranded short interfering RNAs (siRNAs) comprising a sense strand and an antisense strand by a Type III endonuclease known as Dicer (Sharp et al. (2001) Genes Dev. 15:485). Dicer, a ribonuclease-III-like enzyme, processes this dsRNA into 19-23 base pair short interfering RNAs with characteristic two base 3′ overhangs (Bernstein, et al., (2001) Nature 409:363). These siRNAs are then incorporated into an RNA-induced silencing complex (RISC) where one or more helicases unwind the siRNA duplex, enabling the complementary antisense strand to guide target recognition (Nykanen, et al., (2001) Cell 107:309). Upon binding to the appropriate target mRNA, one or more endonucleases within the RISC cleave the target to induce silencing (Elbashir, et al., (2001) Genes Dev. 15:188). Thus, in one aspect the disclosure relates to a single stranded RNA (ssRNA) (the antisense strand of a siRNA duplex) generated within a cell and which promotes the formation of a RISC complex to effect silencing of the target gene, i.e., a MAPT gene. Accordingly, the term “siRNA” is also used herein to refer to an RNAi as described above.

[0171] In another embodiment, the RNAi agent may be a single-stranded RNA that is introduced into a cell or organism to inhibit a target mRNA. Single-stranded RNAi agents bind to the RISC endonuclease, Argonaute 2, which then cleaves the target mRNA. The single-stranded siRNAs are generally 15-30 nucleotides and are chemically modified. The design and testing of single-stranded RNAs are described in U.S. Pat. No. 8,101,348 and in Lima et al., (2012) Cell 150:883-894, the entire contents of each of which are hereby incorporated herein by reference. Any of the antisense nucleotide sequences described herein may be used as a single-stranded siRNA as described herein or as chemically modified by the methods described in Lima et al., (2012) Cell 150:883-894.

[0172] In another embodiment, a “RNAi agent” for use in the compositions and methods of the disclosure is a double stranded RNA and is referred to herein as a “double stranded RNAi agent,” “double stranded RNA (dsRNA) molecule,” “dsRNA agent,” or “dsRNA”. The term “dsRNA” refers to a complex of ribonucleic acid molecules, having a duplex structure comprising two anti-parallel and substantially complementary nucleic acid strands, referred to as having “sense” and “antisense” orientations with respect to a target RNA, i.e., a MAPT gene. In some embodiments of the disclosure, a double stranded RNA (dsRNA) triggers the degradation of a target RNA, e.g., an mRNA, through a post-transcriptional gene-silencing mechanism referred to herein as RNA interference or RNAi.

[0173] In general, a dsRNA molecule can include ribonucleotides, but as described in detail herein, each or both strands can also include one or more non-ribonucleotides, e.g., a deoxyribonucleotide, a modified nucleotide. In addition, as used in this specification, an “RNAi agent” may include ribonucleotides with chemical modifications; an RNAi agent may include substantial modifications at multiple nucleotides. As used herein, the term “modified nucleotide” refers to a nucleotide having, independently, a modified sugar moiety, a modified internucleotide linkage, or a modified nucleobase. Thus, the term modified nucleotide encompasses substitutions, additions or removal of, e.g., a functional group or atom, to internucleoside linkages, sugar moieties, or nucleobases. The modifications suitable for use in the agents of the disclosure include all types of modifications disclosed herein or known in the art. Any such modifications, as used in a siRNA type molecule, are encompassed by “RNAi agent” for the purposes of this specification and claims.

[0174] In certain embodiments of the instant disclosure, inclusion of a deoxy-nucleotide if present within an RNAi agent can be considered to constitute a modified nucleotide.

[0175] The duplex region may be of any length that permits specific degradation of a desired target RNA through a RISC pathway, and may range from about 15-36 base pairs in length, for example, about 15, 16, 17, 18, 19, 20, 21, 22, 23, 24, 25, 26, 27, 28, 29, 30, 31, 32, 33, 34, 35, or 36 base pairs in length, such as about 15-30, 15-29, 15-28, 15-27, 15-26, 15-25, 15-24, 15-23, 15-22, 15-21, 15-20, 15-19, 15-18, 15-17, 18-30, 18-29, 18-28, 18-27, 18-26, 18-25, 18-24, 18-23, 18-22, 18-21, 18-20, 19-30, 19-29, 19-28, 19-27, 19-26, 19-25, 19-24, 19-23, 19-22, 19-21, 19-20, 20-30, 20-29, 20-28, 20-27, 20-26, 20-25, 20-24,20-23, 20-22, 20-21, 21-30, 21-29, 21-28, 21-27, 21-26, 21-25, 21-24, 21-23, or 21-22 base pairs in length. In certain embodiments, the duplex region is 19-21 base pairs in length, e.g., 21 base pairs in length. Ranges and lengths intermediate to the above recited ranges and lengths are also contemplated to be part of the disclosure.

[0176] The two strands forming the duplex structure may be different portions of one larger RNA molecule, or they may be separate RNA molecules. Where the two strands are part of one larger molecule, and therefore are connected by an uninterrupted chain of nucleotides between the 3′-end of one strand and the 5′-end of the respective other strand forming the duplex structure, the connecting RNA chain is referred to as a “hairpin loop.” A hairpin loop can comprise at least one unpaired nucleotide. In some embodiments, the hairpin loop can comprise at least 4, at least 5, at least 6, at least 7, at least 8, at least 9, at least 10, at least 20, at least 23 or more unpaired nucleotides or nucleotides not directed to the target site of the dsRNA. In some embodiments, the hairpin loop can be 10 or fewer nucleotides. In some embodiments, the hairpin loop can be 8 or fewer unpaired nucleotides. In some embodiments, the hairpin loop can be 4-10 unpaired nucleotides. In some embodiments, the hairpin loop can be 4-8 nucleotides.

[0177] Where the two substantially complementary strands of a dsRNA are comprised by separate RNA molecules, those molecules need not, but can be covalently connected. In certain embodiments where the two strands are connected covalently by means other than an uninterrupted chain of nucleotides between the 3′-end of one strand and the 5′-end of the respective other strand forming the duplex structure, the connecting structure is referred to as a “linker” (though it is noted that certain other structures defined elsewhere herein can also be referred to as a “linker”). The RNA strands may have the same or a different number of nucleotides. The maximum number of base pairs is the number of nucleotides in the shortest strand of the dsRNA minus any overhangs that are present in the duplex. In addition to the duplex structure, an RNAi may comprise one or more nucleotide overhangs. In one embodiment of the RNAi agent, at least one strand comprises a 3′ overhang of at least 1 nucleotide. In another embodiment, at least one strand comprises a 3′ overhang of at least 2 nucleotides, e.g., 2, 3, 4, 5, 6, 7, 9, 10, 11, 12, 13, 14, or 15 nucleotides. In other embodiments, at least one strand of the RNAi agent comprises a 5′ overhang of at least 1 nucleotide. In certain embodiments, at least one strand comprises a 5′ overhang of at least 2 nucleotides, e.g., 2, 3, 4, 5, 6, 7, 9, 10, 11, 12, 13, 14, or 15 nucleotides. In still other embodiments, both the 3′ and the 5′ end of one strand of the RNAi agent comprise an overhang of at least 1 nucleotide.

[0178] In one embodiment, an RNAi agent of the disclosure is a dsRNA, each strand of which independently comprises 19-23 nucleotides, that interacts with a target RNA sequence, e.g., a MAPT target mRNA sequence, to direct the cleavage of the target RNA.

[0179] In some embodiments, an iRNA of the invention is a dsRNA of 24-30 nucleotides that interacts with a target RNA sequence, e.g., a MAPT target mRNA sequence, to direct the cleavage of the target RNA.

[0180] As used herein, the term “nucleotide overhang” refers to at least one unpaired nucleotide that protrudes from the duplex structure of an RNAi agent, e.g., a dsRNA. For example, when a 3′-end of one strand of a dsRNA extends beyond the 5′-end of the other strand, or vice versa, there is a nucleotide overhang. A dsRNA can comprise an overhang of at least one nucleotide; alternatively, the overhang can comprise at least two nucleotides, at least three nucleotides, at least four nucleotides, at least five nucleotides or more. A nucleotide overhang can comprise or consist of a nucleotide/nucleoside analog, including a deoxynucleotide/nucleoside. The overhang(s) can be on the sense strand, the antisense strand or any combination thereof. Furthermore, the nucleotide(s) of an overhang can be present on the 5′-end, 3′-end or both ends of either an antisense or sense strand of a dsRNA.

[0181] In one embodiment, the antisense strand of a dsRNA has a 1-10 nucleotide, e.g., a 1, 2, 3, 4, 5, 6, 7, 8, 9, or 10 nucleotide overhang at the 3′-end or the 5′-end. In one embodiment, the sense strand of a dsRNA has a 1-10 nucleotide, e.g., a 1, 2, 3, 4, 5, 6, 7, 8, 9, or 10 nucleotide overhang at the 3′-end or the 5′-end. In another embodiment, one or more of the nucleotides in the overhang is replaced with a nucleoside thiophosphate.

[0182] In certain embodiments, the antisense strand of a dsRNA has a 1-10 nucleotide, e.g., 0-3, 1-3, 2-4, 2-5, 4-10, 5-10, e.g., a 1, 2, 3, 4, 5, 6, 7, 8, 9, or 10 nucleotide overhang at the 3′-end or the 5′-end. In one embodiment, the sense strand of a dsRNA has a 1-10 nucleotide, e.g., a 1, 2, 3, 4, 5, 6, 7, 8, 9, or 10 nucleotide overhang at the 3′-end or the 5′-end. In another embodiment, one or more of the nucleotides in the overhang is replaced with a nucleoside thiophosphate.

[0183] In certain embodiments, the overhang on the sense strand or the antisense strand, can include extended lengths longer than 10 nucleotides, e.g., 1-30 nucleotides, 2-30 nucleotides, 10-30 nucleotides, or 10-15 nucleotides in length. In certain embodiments, an extended overhang is on the sense strand of the duplex. In certain embodiments, an extended overhang is present on the 3′end of the sense strand of the duplex. In certain embodiments, an extended overhang is present on the 5′end of the sense strand of the duplex. In certain embodiments, an extended overhang is on the antisense strand of the duplex. In certain embodiments, an extended overhang is present on the 3′end of the antisense strand of the duplex. In certain embodiments, an extended overhang is present on the 5′end of the antisense strand of the duplex. In certain embodiments, one or more of the nucleotides in the overhang is replaced with a nucleoside thiophosphate. In certain embodiments, the overhang includes a self-complementary portion such that the overhang is capable of forming a hairpin structure that is stable under physiological conditions.

[0184] The terms “blunt” or “blunt ended” as used herein in reference to a dsRNA mean that there are no unpaired nucleotides or nucleotide analogs at a given terminal end of a dsRNA, i.e., no nucleotide overhang. One or both ends of a dsRNA can be blunt. Where both ends of a dsRNA are blunt, the dsRNA is said to be blunt ended. To be clear, a “blunt ended” dsRNA is a dsRNA that is blunt at both ends, i.e., no nucleotide overhang at either end of the molecule. Most often such a molecule will be double stranded over its entire length.

[0185] The term “antisense strand” or “guide strand” refers to the strand of an RNAi agent, e.g., a dsRNA, which includes a region that is substantially complementary to a target sequence, e.g., a MAPT mRNA.

[0186] As used herein, the term “region of complementarity” refers to the region on the antisense strand that is substantially complementary to a sequence, for example a target sequence, e.g., a MAPT nucleotide sequence, as defined herein. Where the region of complementarity is not fully complementary to the target sequence, the mismatches can be in the internal or terminal regions of the molecule. Generally, the most tolerated mismatches are in the terminal regions, e.g., within 5, 4, 3, or 2 nucleotides of the 5′- or 3′-terminus of the RNAi agent. In some embodiments, a double stranded RNA agent of the invention includes a nucleotide mismatch in the antisense strand. In some embodiments, the antisense strand of the double stranded RNA agent of the invention includes no more than 4 mismatches with the target mRNA, e.g., the antisense strand includes 4, 3, 2, 1, or 0 mismatches with the target mRNA. In some embodiments, the antisense strand double stranded RNA agent of the invention includes no more than 4 mismatches with the sense strand, e.g., the antisense strand includes 4, 3, 2, 1, or 0 mismatches with the sense strand. In some embodiments, a double stranded RNA agent of the invention includes a nucleotide mismatch in the sense strand. In some embodiments, the sense strand of the double stranded RNA agent of the invention includes no more than 4 mismatches with the antisense strand, e.g., the sense strand includes 4, 3, 2, 1, or 0 mismatches with the antisense strand. In some embodiments, the nucleotide mismatch is, for example, within 5, 4, 3 nucleotides from the 3′-end of the iRNA. In another embodiment, the nucleotide mismatch is, for example, in the 3′-terminal nucleotide of the iRNA agent. In some embodiments, the mismatch(s) is not in the seed region.

[0187] Thus, an RNAi agent as described herein can contain one or more mismatches to the target sequence. In one embodiment, an RNAi agent as described herein contains no more than 3 mismatches (i.e., 3, 2, 1, or 0 mismatches). In one embodiment, an RNAi agent as described herein contains no more than 2 mismatches. In one embodiment, an RNAi agent as described herein contains no more than 1 mismatch. In one embodiment, an RNAi agent as described herein contains 0 mismatches. In certain embodiments, if the antisense strand of the RNAi agent contains mismatches to the target sequence, the mismatch can optionally be restricted to be within the last 5 nucleotides from either the 5′- or 3′-end of the region of complementarity. For example, in such embodiments, for a 23 nucleotide RNAi agent, the strand which is complementary to a region of a MAPT gene, generally does not contain any mismatch within the central 13 nucleotides. The methods described herein or methods known in the art can be used to determine whether an RNAi agent containing a mismatch to a target sequence is effective in inhibiting the expression of a MAPT gene. For example, Jackson et al. (Nat. Biotechnol. 2003;21: 635-637) described an expression profile study where the expression of a small set of genes with sequence identity to the MAPK14 siRNA only at 12-18 nt of the sense strand, was down-regulated with similar kinetics to MAPK14. Similarly, Lin et al., (Nucleic Acids Res. 2005; 33(14): 4527-4535) using qPCR and reporter assays, showed that a 7 nt complementation between a siRNA and a target is sufficient to cause mRNA degradation of the target. Consideration of the efficacy of RNAi agents with mismatches in inhibiting expression of a MAPT gene is important, especially if the particular region of complementarity in a MAPT gene is known to have polymorphic sequence variation within the population.

[0188] As used herein, “substantially all of the nucleotides are modified” are largely but not wholly modified and can include not more than 5, 4, 3, 2, or 1 unmodified nucleotide.

[0189] The term “sense strand” or “passenger strand” as used herein, refers to the strand of an RNAi agent that includes a region that is substantially complementary to a region of the antisense strand as that term is defined herein.

[0190] As used herein, the term “cleavage region” refers to a region that is located immediately adjacent to the cleavage site. The cleavage site is the site on the target at which cleavage occurs. In some embodiments, the cleavage region comprises three bases on either end of, and immediately adjacent to, the cleavage site. In some embodiments, the cleavage region comprises two bases on either end of, and immediately adjacent to, the cleavage site. In some embodiments, the cleavage site specifically occurs at the site bound by nucleotides 10 and 11 of the antisense strand, and the cleavage region comprises nucleotides 11, 12 and 13.

[0191] As used herein, and unless otherwise indicated, the term “complementary,” when used to describe a first nucleotide sequence in relation to a second nucleotide sequence, refers to the ability of an oligonucleotide or polynucleotide comprising the first nucleotide sequence to hybridize and form a duplex structure under certain conditions with an oligonucleotide or polynucleotide comprising the second nucleotide sequence, as will be understood by the skilled person. Such conditions can be, for example, “stringent conditions”, including but not limited to, 400 mM NaCl, 40 mM PIPES pH 6.4, 1 mM EDTA, 50° C. or 70° C. for 12-16 hours followed by washing (see, e.g., “Molecular Cloning: A Laboratory Manual, Sambrook, et al. (1989) Cold Spring Harbor Laboratory Press). As used herein, “stringent conditions” or “stringent hybridization conditions” refers to conditions under which an antisense compound will hybridize to its target sequence, but to a minimal number of other sequences. Stringent conditions are sequence-dependent and will be different in different circumstances, and “stringent conditions” under which antisense compounds hybridize to a target sequence are determined by the nature and composition of the antisense compounds and the assays in which they are being investigated. Other conditions, such as physiologically relevant conditions as can be encountered inside an organism, can apply. The skilled person will be able to determine the set of conditions most appropriate for a test of complementarity of two sequences in accordance with the ultimate application of the hybridized nucleotides.

[0192] Complementary sequences within an RNAi agent, e.g., within a dsRNA as described herein, include base-pairing of the oligonucleotide or polynucleotide comprising a first nucleotide sequence to an oligonucleotide or polynucleotide comprising a second nucleotide sequence over the entire length of one or both nucleotide sequences. Such sequences can be referred to as “fully complementary” with respect to each other herein. However, where a first sequence is referred to as “substantially complementary” with respect to a second sequence herein, the two sequences can be fully complementary, or they can form one or more, but generally not more than 5, 4, 3 or 2 mismatched base pairs upon hybridization for a duplex up to 30 base pairs. In some embodiments, the “substantially complementary” sequences disclosed herein comprise a contiguous nucleotide sequence which is at least about 80% complementary over its entire length to the equivalent region of the target MAPT sequence, such as about 85%, about 90%, about 91%, about 92%, about 93%, about 94%, about 95%, about 96%, about 97%, about 98%, or about 99% complementary. However, where two oligonucleotides are designed to form, upon hybridization, one or more single stranded overhangs, such overhangs shall not be regarded as mismatches with regard to the determination of complementarity. For example, a dsRNA comprising one oligonucleotide 21 nucleotides in length and another oligonucleotide 23 nucleotides in length, wherein the longer oligonucleotide comprises a sequence of 21 nucleotides that is fully complementary to the shorter oligonucleotide, can yet be referred to as “fully complementary” for the purposes described herein.

[0193] “Complementary” sequences, as used herein, can also include, or be formed entirely from, non-Watson-Crick base pairs or base pairs formed from non-natural and modified nucleotides, in so far as the above requirements with respect to their ability to hybridize are fulfilled. Such non-Watson-Crick base pairs include, but are not limited to, G:U Wobble or Hoogstein base pairing.

[0194] The terms “complementary,” “fully complementary” and “substantially complementary” herein can be used with respect to the base matching between the sense strand and the antisense strand of a dsRNA, or between the antisense strand of an RNAi agent and a target sequence, as will be understood from the context of their use.

[0195] As used herein, a polynucleotide that is “substantially complementary to at least part of” a messenger RNA (mRNA) refers to a polynucleotide that is substantially complementary to a contiguous portion of the mRNA of interest (e.g., an mRNA encoding Tau). For example, a polynucleotide is complementary to at least a part of a MAPT mRNA if the sequence is substantially complementary to a non-interrupted portion of an mRNA encoding Tau.

[0196] Accordingly, in some embodiments, the antisense polynucleotides disclosed herein are fully complementary to the target MAPT sequence. In other embodiments, the antisense polynucleotides disclosed herein are substantially complementary to the target MAPT sequence and comprise a contiguous nucleotide sequence which is at least 80% complementary over its entire length to the equivalent region of the nucleotide sequence of any one of SEQ ID NOs:1, 3, 5, 7, 9 and 11, or a fragment of any one of SEQ ID NOs:1, 3, 5, 7, 9 and 11, such as about 85%, about 90%, about 91%, about 92%, about 93%, about 94%, about 95%, about 96%, about 97%, about 98%, or about 99% complementary.

[0197] In some embodiments, the antisense polynucleotides disclosed herein are substantially complementary to a fragment of a target MAPT sequence and comprise a contiguous nucleotide sequence which is at least 80% complementary over its entire length to a fragment of SEQ ID NO: 1 selected from the group of nucleotides 977-997, 980-1000, 973-993, 988-1008, 987-1007, 972-992, 979-999, 1001-1021, 976-996, 994-1014, 1002-1022, 978-998, 974-994, 981-1001, 995-1015, 1003-1023, 989-1009, 1031-1051, 975-995, 983-1003, 992-1012, 982-1002, 1236-1256, 1023-1043, 986-1006, 1014-1034, 1237-1257, 1030-1050, 997-1017, 1009-1029, 1013-1033, 1027-1047, 998-1018, 1026-1046, 1022-1042, 1065-1085, 1025-1045, 1017-1037, 1006-1026, 1000-1020, 984-1004, 1010-1030, 1064-1084, 1016-1036, 993-1013, 1033-1053, 971-991, 1008-1028, 1032-1052, 1015-1035, 1063-1083, 1020-1040, 985-1005, 999-1019, 1004-1024, 1024-1044, 1104-1124, 990-1010, 1005-1025, 1021-1041, 1028-1048, 996-1016, 1011-1031, 991-1011, 1018-1038, 1228-1248, 1230-1250, 1029-1049, 1019-1039, 1012-1032, 1062-1082, 1231-1251, 1229-1249, 1226-1246, 1227-1247, 975-997, 978-1000, 971-993, 986-1008, 985-1007, 977-999, 999-1021, 974-996, 992-1014, 1000-1022, 976-998, 972-994, 979-1001, 993-1015, 1001-1023, 987-1009, 1029-1051, 973-995, 981-1003, 990-1012, 980-1002, 1234-1256, 1021-1043, 984-1006, 1012-1034, 1235-1257, 1028-1050, 995-1017, 1007-1029, 1011-1033, 1025-1047,996-1018, 1024-1046, 1020-1042, 1063-1085, 1023-1045, 1015-1037, 1004-1026, 998-1020, 982-1004, 1008-1030, 1062-1084, 1014-1036, 991-1013, 1031-1053, 1006-1028, 1030-1052, 1013-1035, 1018-1040, 983-1005, 997-1019, 1002-1024, 1022-1044, 988-1010, 1003-1025, 1019-1041, 1026-1048, 994-1016, 1009-1031, 989-1011, 1016-1038, 1226-1248, 1228-1250, 1027-1049, 1017-1039, 1010-1032, 1229-1251, 1227-1249, 1224-1246, and 1225-1247 of SEQ ID NO: 1, such as about 85%, about 90%, about 91%, about 92%, about 93%, about 94%, about 95%, about 96%, about 97%, about 98%, or about 99% complementary. Ranges intermediate to the above recited ranges are also contemplated to be part of the disclosure.

[0198] In some embodiments, the antisense polynucleotides disclosed herein are substantially complementary to a fragment of a target MAPT sequence and comprise a contiguous nucleotide sequence which is at least 80% complementary over its entire length to a fragment of SEQ ID NO: 1 selected from the group of nucleotides 520-540, 521-541, 5464-5484, 1813-1833, 2378-2398, 3242-3262, 5442-5462, 1665-1685, 1816-1836, 4667-4687, 3183-3203, 3422-3442, 3326-3346, 2379-2399, 3338-3358, 5446-5466, 5440-5460, 5410-5430, 3246-3266, 3181-3201, 2297-2317, 2380-2400, 3328-3348, 5460-5480, 3184-3204, 3420-3440, 3321-3341, 4529-4549, 5473-5493, 5466-5486, 5439-5459, 5369-5389, 4528-4548, 3338-3358, 4670-4690, 3421-3441, 2298-2318, 5444-5464, 5448-5468, 3337-3357, 5415-5435, 3340-3360, 3318-3338, 5207-5227, 1812-1832, 5409-5429, 4629-4649, 4628-4648, 3344-3364, 1809-1829, 5443-5463, 3244-3264, 3180-3200, 3327-3347, 4522-4542, 2667-2687, 4668-4688, 4083-4103, 5445-5465, 2294-2314, 4842-4862, 5438-5458, 4084-4104, 2668-2688, 4526-4546, 4521-4541, 5459-5479, 3188-3208, 5467-5487, 5441-5461, 4519-4539, 4669-4689, 5450-5470, 3341-3361, 5458-5478, 4520-4540, 4329-4349, 4525-4545, 4524-4544, 5208-5228, 5305-5325, 4475-4495, 2666-2686, 4086-4106, 4523-4543, 4527-4547, 4085-4105, 5259-5279, 518-540, 519-541, 5462-5484, 1811-1833, 2376-2398, 3240-3262, 5440-5462, 1663-1685, 1814-1836, 4665-4687, 3181-3203, 3420-3442, 3324-3346, 2377-2399, 3336-3358, 5444-5466, 5438-5460, 5408-5430, 3244-3266, 3179-3201, 2295-2317, 2378-2400, 3326-3348, 5458-5480, 3182-3204, 3418-3440, 3319-3341, 4527-4549, 5471-5493, 5464-5486, 5437-5459, 5367-5389, 4526-4548, 4668-4690, 3419-3441, 2296-2318, 5442-5464, 5446-5468, 3335-3357, 5413-5435, 3338-3360, 3316-3338, 1810-1832, 5407-5429, 4627-4649, 4626-4648, 3342-3364, 1807-1829, 5441-5463, 3242-3264, 3178-3200, 3325-3347, 4520-4542, 2665-2687, 4666-4688, 4081-4103, 5443-5465, 2292-2314, 4840-4862, 5436-5458, 4082-4104, 2666-2688, 4524-4546, 4519-4541, 5457-5479, 3186-3208, 5465-5487, 5439-5461, 4517-4539, 4667-4689, 5448-5470, 3339-3361, 5456-5478, 4518-4540, 4327-4349, 4523-4545, 4522-4544, 5206-5228, 5303-5325, 4473-4495, 2664-2686, 4084-4106, 4521-4543, 4525-4547, 4083-4105, and 5257-5279 of SEQ ID NO: 1, such as about 85%, about 90%, about 91%, about 92%, about 93%, about 94%, about 95%, about 96%, about 97%, about 98%, or about 99% complementary. Ranges intermediate to the above recited ranges are also contemplated to be part of the disclosure.

[0199] In some embodiments, the antisense polynucleotides disclosed herein are substantially complementary to a fragment of a target MAPT sequence and comprise a contiguous nucleotide sequence which is at least 80% complementary over its entire length to a fragment of SEQ ID NO: 1 selected from the group of nucleotides 520-540, 524-544, 521-541, 5207-5227, 4670-4690, 3420-3440, 3328-3348, 1665-1685, 5409-5429, 5439-5459, 4527-4547, 5441-5461, 5410-5430, 5446-5466, 5467-5487, 5369-5389, 3421-3441, 5442-5462, 2379-2399, 4715-4735, 5464-5484, 3244-3264, 5440-5460, 1812-1832, 3181-3201, 3327-3347, 5448-5468, 4529-4549, 2378-2398, 4668-4688, 5438-5458, 5465-5485, 3326-3346, 3180-3200, 5458-5478, 3321-3341, 3338-3358, 3188-3208, 2294-2314, 4628-4648, 5415-5435, 5459-5479, 3184-3204, 2375-2395, 3422-3442, 3246-3266, 3337-3357, 2297-2317, 4528-4548, 3183-3203, 5450-5470, 5444-5464, 5466-5486, 2380-2400, 3242-3262, 4520-4540, 5445-5465, 3318-3338, 1816-1836, 5443-5463, 5460-5480, 4842-4862, 3338-3358, 1809-1829, 3423-3443, 4720-4740, 5259-5279, 4084-4104, 1813-1833, 4522-4542, 4822-4842, 4523-4543, 2298-2318, 4521-4541, 4086-4106, 4524-4544, 2668-2688, 4667-4687, 4083-4103, 4085-4105, 4629-4649, 4329-4349, 2667-2687, 4475-4495, 3344-3364, 4669-4689, 3340-3360, 4519-4539, 2666-2686, 5208-5228, 4526-4546, 4525-4545, 3341-3361, 518-540, 522-544, 519-541, 4668-4690, 3418-3440, 3326-3348, 1663-1685, 5407-5429, 5437-5459, 4525-4547, 5439-5461, 5408-5430, 5444-5466, 5465-5487, 5367-5389, 3419-3441, 5440-5462, 2377-2399, 4713-4735, 5462-5484, 3242-3264, 5438-5460, 1810-1832, 3179-3201, 3325-3347, 5446-5468, 4527-4549, 2376-2398, 4666-4688, 5436-5458, 5463-5485, 3324-3346, 3178-3200, 5456-5478, 3319-3341, 3336-3358, 3186-3208, 2292-2314, 4626-4648, 5413-5435, 5457-5479, 3182-3204, 2373-2395, 3420-3442, 3244-3266, 3335-3357, 2295-2317, 4526-4548, 3181-3203, 5448-5470, 5442-5464, 5464-5486, 2378-2400, 3240-3262, 4518-4540, 5443-5465, 3316-3338, 1814-1836, 5441-5463, 5458-5480, 4840-4862, 1807-1829, 3421-3443, 4718-4740, 5257-5279, 4082-4104, 1811-1833, 4520-4542, 4820-4842, 4521-4543, 2296-2318, 4519-4541, 4084-4106, 4522-4544, 2666-2688, 4665-4687, 4081-4103, 4083-4105, 4627-4649, 4327-4349, 2665-2687, 4473-4495, 3342-3364, 4667-4689, 3338-3360, 4517-4539, 2664-2686, 5206-5228, 4524-4546, 4523-4545, and 3339-3361 of SEQ ID NO: 1, such as about 85%, about 90%, about 91%, about 92%, about 93%, about 94%, about 95%, about 96%, about 97%, about 98%, or about 99% complementary. Ranges intermediate to the above recited ranges are also contemplated to be part of the disclosure.

[0200] In some embodiments, the antisense polynucleotides disclosed herein are substantially complementary to a fragment of a target MAPT sequence and comprise a contiguous nucleotide sequence which is at least 80% complementary over its entire length to a fragment of SEQ ID NO: 1 selected from the group of nucleotides 977-997, 980-1000, 973-993, 988-1008, 987-1007, 972-992, 979-999, 1001-1021, 976-996, 994-1014, 1002-1022, 978-998, 974-994, 520-540, 521-541, 5464-5484, 1813-1833, 2378-2398, 3242-3262, 5442-5462, 1665-1685, 524-544, 5207-5227, 4670-4690, 3420-3440, 3328-3348, 5409-5429, 5439-5459, 4527-4547, 5441-5461, 5410-5430 and 5446-5466 of SEQ ID NO: 1, such as about 85%, about 90%, about 91%, about 92%, about 93%, about 94%, about 95%, about 96%, about 97%, about 98%, or about 99% complementary. Ranges intermediate to the above recited ranges are also contemplated to be part of the disclosure.

[0201] In some embodiments, the antisense polynucleotides disclosed herein are substantially complementary to a fragment of a target MAPT sequence and comprise a contiguous nucleotide sequence which is at least 80% complementary over its entire length to a fragment of SEQ ID NO: 3 selected from the group of nucleotides 512-532, 513-533, 514-534, 515-535, 516-536, 517-537, 518-538,519-539,520-540, 1063-1083,1067-1087, 1072-1092,1074-1094, 1075-1095,1125-1145, 1126-1146, 1127-1147, 1129-1149, 1170-1190, 1395-1415, 1905-1925, 1906-1926, 1909-1929, 1911-1931, 1912-1932, 1913-1933, 1914-1934, 1915-1935, 1916-1936, 1919-1939, 1951-1971, 1954-1974, 1958-1978, 2387-2407, 2409-2429, 2410-2430, 2469-2489, 2471-2491, 2472-2492, 2476-2496, 2477-2497, 2478-2498, 2480-2500, 2481-2501, 2482-2502, 2484-2504, 2762-2782, 2764-2784, 2766-2786, 2767-2787, 2768-2788, 2769-2789, 2819-2839, 2821-2841, 2828-2848, 2943-2963, 2944-2964, 2946-2966, 2947-2967, 3252-3272, 3277-3297, 3280-3300, 3281-3301, 3282-3302, 3284-3304, 3285-3305, 3286-3306, 3331-3351, 3332-3352, 3333-3353, 3334-3354, 3335-3355, 3336-3356, 3338-3358, 3340-3360, 3342-3362, 3343-3363, 3344-3364, 3345-3365, 3346-3366, 3347-3367, 3349-3369, 3350-3370, 3353-3373, 3364-3384, 3366-3386, 3367-3387, 3368-3388, 3369-3389, 3370-3390, 3412-3432, 3414-3434, 3415-3435, 3416-3436, 3417-3437, 3419-3439, 3420-3440, 3424-3444, 3425-3445, 3426-3446, 3427-3447, 3428-3448, 3429-3449, 3430-3450, 3431-3451, 3434-3454, 4132-4152, 4134-4154, 4179-4199, 4182-4202, 4184-4204, 4395-4415, 4425-4445, 4426-4446, 4429-4449, 4469-4489, 4470-4490, 4471-4491, 4472-4492, 4473-4493, 4474-4494, 4569-4589, 4571-4591, 4572-4592, 4596-4616, 4623-4643, 4721-4741, 4722-4742, 4725-4745, 4726-4746, 4766-4786, 4767-4787, 4768-4788, 4769-4789, 4770-4790, 4779-4799, 4805-4825, 4806-4826, 4807-4827, 4808-4828, 4809-4829, 4812-4832, 4813-4833, 4814-4834, 4936-4956, 5072-5092, 5073-5093, 5345-5365, 5346-5366, 5349-5369, 5350-5370, 5351-5371, 5460-5480, 5461-5481, 5463-5483, 5465-5485, 5467-5487, 5468-5488, 5469-5489, 5470-5490, 5471-5491, 5505-5525, 5506-5526, 5507-5527, 5508-5528, 5509-5529, 5511-5531, 5513-5533, 5514-5534, 5541-5561, 5544-5564, 5546-5566, 5547-5567, 5548-5568, 5550-5570, 5551-5571, 5574-5594, 5576-5596, 5614-5634, 521-541, 522-542, 523-543, 524-544, 525-545, 526-546, 527-547, 528-548, 529-549, 530-550, 531-551, 532-552, 533-553, 534-554, 535-555, 536-556, 1034-1054, 1035-1055, 1036-1056, 1037-1057, 1038-1058, 1039-1059, 1040-1060, 1041-1061, 1042-1062, 1043-1063, 1044-1064, 1045-1065, 1046-1066, 1047-1067, 1048-1068, 1049-1069, 1050-1070, 1051-1071, 1052-1072, 1053-1073, 1054-1074, 1062-1082, 1064-1084, 1065-1085, 1066-1086, 1068-1088, 1069-1089, 1070-1090, 1071-1091, 1073-1093, 1076-1096, 1077-1097, 1078-1098, 1079-1099, 1080-1100, 1081-1101, 1082-1102, 1128-1148, 1129-1149, 1130-1150, 1131-1151, 1132-1152, 1133-1153, 1134-1154, 1135-1155, 1136-1156, 1137-1157, 1138-1158, 1139-1159, 1140-1160, 1141-1161, 1142-1162, 1143-1163, 1144-1164, 1145-1165, 1146-1166, 1147-1167, 1148-1168, 975-995, 976-996, 977-997, 978-998, 979-999, 980-1000, 981-1001, 982-1002, 983-1003, 984-1004, 985-1005, 986-1006, 987-1007, 988-1008, 989-1009, 990-1010, 991-1011, 992-1012, 993-1013, 994-1014, 995-1015, 996-1016, 997-1017, 998-1018, 999-1019, 1000-1020, 1001-1021, 1002-1022, 1003-1023, 1004-1024, 1005-1025, 1006-1026, 1007-1027, 1008-1028, 1009-1029, 1010-1030, 1011-1031, 1012-1032, 1013-1033, 1014-1034, 1015-1035, 1016-1036, 1017-1037, 1018-1038, 1019-1039, 1020-1040, 1021-1041, 1022-1042, 1023-1043, 1024-1044, 1025-1045, 1026-1046, 1027-1047, 1028-1048, 1029-1049, 1030-1050, 1031-1051, 1032-1052, 1033-1053, 1034-1054,1035-1055, 1036-1056, 1037-1057, 1038-1058, 1039-1059, 1040-1060, 1041-1061, 1042-1062, 1043-1063 and 1045-1065 of SEQ ID NO: 3, such as about 85%, about 90%, about 91%, about 92%, about 93%, about 94%, about 95%, about 96%, about 97%, about 98%, or about 99% complementary. Ranges intermediate to the above recited ranges are also contemplated to be part of the disclosure.

[0202] In some embodiments, the antisense polynucleotides disclosed herein are substantially complementary to a fragment of a target MAPT sequence and comprise a contiguous nucleotide sequence which is at least 80% complementary over its entire length to a fragment of SEQ ID NO: 5 selected from the group of nucleotides 1065-1085, 1195-1215, 1066-1086, 1068-1088, 705-725, 1067-1087, 4520-4540, 3341-3361, 4515-4535, 5284-5304, 5285-5305, 344-364, 5283-5303, 5354-5374, 2459-2479, 1061-1081, 706-726, 972-992, 4564-4584, 995-1015, 4546-4566, 968-988, 1127-1147, 4534-4554, 158-178, 4494-4514, 1691-1711, 3544-3564, 198-218, 979-999, 4548-4568, 4551-4571, 543-563, 715-735, 542-562, 352-372, 362-382, 4556-4576, 4547-4567, 4542-4562, 4558-4578, 4549-4569, 5074-5094, 4552-4572, 5073-5093, 5076-5096, 4550-4570 and 2753-2773 of SEQ ID NO: 5, such as about 85%, about 90%, about 91%, about 92%, about 93%, about 94%, about 95%, about 96%, about 97%, about 98%, or about 99% complementary. Ranges intermediate to the above recited ranges are also contemplated to be part of the disclosure.

[0203] In other embodiments, the antisense polynucleotides disclosed herein are substantially complementary to the target MAPT sequence and comprise a contiguous nucleotide sequence which is at least about 80% complementary over its entire length to any one of the sense strand nucleotide sequences in any one of any one of Tables 3-8, 12-13, and 16-28, or a fragment of any one of the sense strand nucleotide sequences in any one of Tables 3-8, 12-13, and 16-28, such as about 85%, about 90%, about 91%, about 92%, about 93%, about 94%, about 95%, about 96%, about 97%, about 98%, about 99%, or 100% complementary.

[0204] In one embodiment, an RNAi agent of the disclosure includes a sense strand that is substantially complementary to an antisense polynucleotide which, in turn, is the same as a target MAPT sequence, and wherein the sense strand polynucleotide comprises a contiguous nucleotide sequence which is at least about 80% complementary over its entire length to the equivalent region of the nucleotide sequence of SEQ ID NOs:1, 3, 5, 7, 9 and 11, or a fragment of any one of SEQ ID NOs: 1, 3, 5, 7, 9 and 11, such as about 85%, about 90%, about 91%, about 92%, about 93%, about 94%, about 95%, about 96%, about 97%, about 98%, about 99%, or 100% complementary. In some embodiments, an iRNA of the invention includes a sense strand that is substantially complementary to an antisense polynucleotide which, in turn, is complementary to a target MAPT sequence, and wherein the sense strand polynucleotide comprises a contiguous nucleotide sequence which is at least about 80% complementary over its entire length to any one of the antisense strand nucleotide sequences in any one of Tables 3-8, 12-13, and 16-28, or a fragment of any one of the antisense strand nucleotide sequences in any one of Tables 3-8, and 16-28, such as about 85%, about 90%, about 91%, about 92%, about 93%, about 94%, about 95%, about 96%, about 97%, about 98%, about 99%, or 100% complementary.

[0205] In certain embodiments, the sense and antisense strands are selected from any one of duplexes AD-523799.1, AD-523802.1, AD-523795.1, AD-523810.1, AD-523809.1, AD-1019331.1, AD-523801.1, AD-523823.1, AD-523798.1, AD-523816.1, AD-523824.1, AD-523800.1, AD-523796.1, AD-523803.1, AD-523817.1, AD-523825.1, AD-523811.1, AD-523854.1, AD-523797.1, AD-523805.1, AD-523814.1, AD-523804.1, AD-1019356.1, AD-523846.1, AD-523808.1, AD-523835.1, AD-1019357.1, AD-523853.1, AD-523819.1, AD-523830.1, AD-523834.1, AD-523850.1, AD-523820.1, AD-523849.1, AD-523845.1, AD-393758.3, AD-523848.1, AD-523840.1, AD-523828.1, AD-523822.1, AD-523806.1, AD-523831.1, AD-393757.1, AD-523839.1, AD-523815.1, AD-523856.1, AD-1019330.1, AD-523829.1, AD-523855.1, AD-523836.1, AD-1019329.1, AD-523843.1, AD-523807.1, AD-523821.1, AD-523826.1, AD-523847.1, AD-523786.1, AD-523812.1, AD-523827.1, AD-523844.1, AD-523851.1, AD-523818.1, AD-523832.1, AD-523813.1, AD-523841.1, AD-1019352.1, AD-1019354.1, AD-523852.1, AD-523842.1, AD-523833.1, AD-1019328.1, AD-1019355.1, AD-1019353.1, AD-1019350.1 and AD-1019351.1. In particular embodiments, the sense and antisense strands are selected from any one of duplexes AD-523799.1, AD-523802.1, AD-523795.1, AD-523810.1, AD-523809.1, AD-1019331.1, AD-523801.1, AD-523823.1, AD-523798.1, AD-523816.1, AD-523824.1, AD-523800.1 and AD-523796.1.

[0206] In certain embodiments, the sense and antisense strands are selected from any one of duplexes AD-535094.1, AD-535094.1, AD-535095.1, AD-538647.1, AD-535922.1, AD-536317.1, AD-536911.1, AD-538626.1, AD-535864.1, AD-535925.1, AD-538012.1, AD-536872.1, AD-536954.1, AD-536964.1, AD-536318.1, AD-536976.1, AD-538630.1, AD-538624.1, AD-538594.1, AD-536915.1, AD-536870.1, AD-536236.1, AD-536319.1, AD-536966.1, AD-538643.1, AD-536873.1, AD-536952.1, AD-536959.1, AD-537921.1, AD-538652.1, AD-538649.1, AD-538623.1, AD-538573.1, AD-537920.1, AD-536939.1, AD-538015.1, AD-536953.1, AD-536237.1, AD-538628.1, AD-538632.1, AD-536975.1, AD-538599.1, AD-536978.1, AD-536956.1, AD-538571.1, AD-535921.1, AD-538593.1, AD-537974.1, AD-537973.1, AD-536982.1, AD-535918.1, AD-538627.1, AD-536913.1, AD-536869.1, AD-536965.1, AD-537914.1, AD-536504.1, AD-538013.1, AD-537579.1, AD-538629.1, AD-536233.1, AD-538141.1, AD-538622.1, AD-537580.1, AD-536505.1, AD-537918.1, AD-537913.1, AD-538642.1, AD-536877.1, AD-538650.1, AD-538625.1, AD-537911.1, AD-538014.1, AD-538634.1, AD-536979.1, AD-538641.1, AD-537912.1, AD-537761.1, AD-537917.1, AD-537916.1, AD-538432.1, AD-538529.1, AD-537867.1, AD-536503.1, AD-537582.1, AD-537915.1, AD-537919.1, AD-537581.1 and AD-538483.1. In particular embodiments, the sense and antisense strands are selected from any one of duplexes AD-535094.1, AD-535094.1, AD-535095.1, AD-538647.1, AD-535922.1, AD-536317.1, AD-536911.1, AD-538626.1 and AD-535864.1.

[0207] In certain embodiments, the sense and antisense strands are selected from any one of duplexes AD-523561.1, AD-523565.1, AD-523562.1, AD-526914.1, AD-526394.1, AD-395452.1, AD-525343.1, AD-524274.1, AD-526956.1, AD-526986.1, AD-526296.1, AD-526988.1, AD-526957.1, AD-526993.1, AD-527013.1, AD-526936.1, AD-395453.1, AD-526989.1, AD-524719.1, AD-526423.1, AD-527010.1, AD-525305.1, AD-526987.1, AD-524331.1, AD-525266.1, AD-525342.1, AD-526995.1, AD-526298.1, AD-524718.1, AD-526392.1, AD-526985.1, AD-527011.1, AD-525341.1, AD-525265.1, AD-527004.1, AD-525336.1, AD-525353.1, AD-525273.1, AD-524638.1, AD-526350.1, AD-526962.1, AD-527005.1, AD-525269.1, AD-524715.1, AD-395454.1, AD-525307.1, AD-525352.1, AD-524641.1, AD-526297.1, AD-525268.1, AD-526997.1, AD-526991.1, AD-527012.1, AD-524720.1, AD-525303.1, AD-526289.1, AD-526992.1, AD-525333.1, AD-524335.1, AD-526990.1, AD-527006.1, AD-526505.1, AD-525309.1, AD-524328.1, AD-395455.1, AD-526428.1, AD-526847.1, AD-525957.1, AD-524332.1, AD-526291.1, AD-526485.1, AD-526292.1, AD-524642.1, AD-526290.1, AD-525959.1, AD-526293.1, AD-524899.1, AD-526391.1, AD-525956.1, AD-525958.1, AD-526351.1, AD-526138.1, AD-524898.1, AD-526244.1, AD-525359.1, AD-526393.1, AD-525355.1, AD-526288.1, AD-524897.1, AD-526796.1, AD-526295.1, AD-526294.1 and AD-525356.1. In particular embodiments, the sense and antisense strands are selected from any one of duplexes AD-523561.1, AD-523565.1, AD-523562.1, AD-526914.1, AD-526394.1, AD-395452.1, AD-525343.1, AD-524274.1, AD-526956.1, AD-526986.1, AD-526296.1, AD-526988.1, AD-526957.1, and AD-526993.1.

[0208] In certain embodiments, the sense and antisense strands are selected from any one of duplexes AD-393758.1, AD-393888.1, AD-393759.1, AD-393761.1, AD-393495.1, AD-393760.1, AD-396425.1, AD-395441.1, AD-396420.1, AD-397103.1, AD-397104.1, AD-393239.1, AD-397102.1, AD-397167.1, AD-394791.1, AD-393754.1, AD-393496.1, AD-393667.1, AD-396467.1, AD-393690.1, AD-396449.1, AD-393663.1, AD-393820.1, AD-396437.1, AD-393084.1, AD-396401.1, AD-394296.1, AD-395574.1, AD-393124.1, AD-393674.1, AD-396451.1, AD-396454.1, AD-393376.1, AD-393505.1, AD-393375.1, AD-393247.1, AD-393257.1, AD-396459.1, AD-396450.1, AD-396445.1, AD-396461.1, AD-396452.1, AD-396913.1, AD-396455.1, AD-396912.1, AD-396915.1, AD-396453.1 and AD-394991.1.

[0209] In one embodiment, the sense and antisense strands are selected from any one of duplexes AD-1397070.1, AD-1397070.2, AD-1397071.1, AD-1397071.2, AD-1397072.1, AD-1397072.2, AD-1397073.1, AD-1397073.2, AD-1397074.1, AD-1397074.2, AD-1397075.1, AD-1397075.2, AD-1397076.1, AD-1397076.2, AD-1397077.1, AD-1397077.2, AD-1397078.1, AD-1397078.2, AD-1397250.1, AD-1397251.1, AD-1397252.1, AD-1397253.1, AD-1397254.1, AD-1397255.1, AD-1397256.1, AD-1397257.1, AD-1397258.1, AD-1397259.1, AD-1397260.1, AD-1397261.1, AD-1397262.1, AD-1397263.1, AD-1397264.1, AD-1397265.1, AD-1423242.1, AD-1423243.1, AD-1423244.1, AD-1423245.1, AD-1423246.1, AD-1423247.1, AD-1423248.1, AD-1423249.1, AD-1423250.1, AD-1423251.1, AD-1423252.1, AD-1423253.1, AD-1423254.1, AD-1423255.1, AD-1423256.1, AD-1423257.1, AD-1423258.1, AD-1423259.1, AD-1423260.1, AD-1423261.1, AD-1423262.1, AD-1423263.1, AD-1423264.1, AD-1423265.1, AD-1423266.1, AD-1423267.1, AD-1423268.1, AD-1423269.1, AD-1423270.1, AD-1423271.1, AD-1423272.1, AD-1423273.1, AD-1423274.1, AD-1423275.1, AD-1423276.1, AD-1423277.1, AD-1423278.1, AD-1423279.1, AD-1423280.1, AD-1423281.1, AD-1423282.1, AD-1423283.1, AD-1423284.1, AD-1423285.1, AD-1423286.1, AD-1423287.1, AD-1423288.1, AD-1423289.1, AD-1423290.1, AD-1423291.1, AD-1423292.1, AD-1423293.1, AD-1423294.1, AD-1423295.1, AD-1423296.1, AD-1423297.1, AD-1423298.1, AD-1423299.1, AD-1423300.1, AD-1397266.1, AD-1397266.2, AD-1397267.1, AD-1423301.1, AD-1397268.1, AD-1397268.2, AD-1397269.1, AD-1423302.1, AD-1397270.1, AD-1397270.2, AD-1397271.1, AD-1397271.2, AD-1397272.1, AD-1423303.1, AD-1397273.1, AD-1423304.1, AD-1397274.1, AD-1423305.1, AD-1397275.1, AD-1423306.1, AD-1397276.1, AD-1397277.1, AD-1397277.2, AD-1397278.1, AD-1397279.1, AD-1397280.1, AD-1397281.1, AD-1397282.1, AD-1397283.1, AD-1397284.1, AD-1397285.1, AD-1397286.1, AD-1397287.1, AD-1397079.1, AD-1397079.2, AD-1397288.1, AD-1397289.1, AD-1397290.1, AD-1397080.1, AD-1397080.2, AD-1397291.1, AD-1397292.1, AD-1397293.1, AD-1397294.1, AD-1397081.1, AD-1397081.2, AD-1397295.1, AD-1397082.1, AD-1397082.2, AD-1397083.1, AD-1397083.2, AD-1397296.1, AD-1397297.1, AD-1397298.1, AD-1397299.1, AD-1397300.1, AD-1397301.1, AD-1397302.1, AD-1397084.1, AD-1397085.1, AD-1397086.1, AD-1397303.1, AD-1397087.1, AD-1397087.2, AD-1397304.1, AD-1397305.1, AD-1397306.1, AD-1397307.1, AD-1397308.1, AD-1397309.1, AD-1397310.1, AD-1397311.1, AD-1397312.1, AD-1397313.1, AD-1397314.1, AD-1397315.1, AD-1397316.1, AD-1397317.1, AD-1397318.1, AD-1397319.1, AD-1397320.1, AD-1397321.1, AD-1397322.1, AD-1397088.1, AD-1397089.1, AD-1397090.1, AD-1397091.1, AD-1397092.1, AD-1397093.1, AD-1397094.1, AD-1397095.1, AD-1397096.1, AD-1397097.1, AD-1397098.1, AD-1397099.1, AD-1397101.1, AD-1397102.1, AD-1397103.1, AD-1397104.1, AD-1397105.1, AD-1397106.1, AD-1397107.1, AD-1397108.1, AD-1397109.1, AD-1397110.1, AD-1397111.1, AD-1397112.1, AD-1397113.1, AD-1397114.1, AD-1397115.1, AD-1397116.1, AD-1397117.1, AD-1397118.1, AD-1397119.1, AD-1397120.1, AD-1397121.1, AD-1397122.1, AD-1397123.1, AD-1397124.1, AD-1397125.1, AD-1397126.1, AD-1397127.1, AD-1397128.1, AD-1397129.1, AD-1397130.1, AD-1397131.1, AD-1397132.1, AD-1397133.1, AD-1397134.1, AD-1397135.1, AD-1397136.1, AD-1397137.1, AD-1397138.1, AD-1397139.1, AD-1397140.1, AD-1397141.1, AD-1397142.1, AD-1397143.1, AD-1397144.1, AD-1397145.1, AD-1397146.1, AD-1397147.1, AD-1397148.1, AD-1397149.1, AD-1397150.1, AD-1397151.1, AD-1397152.1, AD-1397153.1, AD-1397154.1, AD-1397155.1, AD-1397156.1, AD-1397157.1, AD-1397158.1, AD-1397159.1, AD-1397160.1, AD-1397161.1, AD-1397162.1, AD-1397163.1, AD-1397164.1, AD-1397165.1, AD-1397166.1, AD-1397167.1, AD-1397168.1, AD-1397169.1, AD-1397170.1, AD-1397171.1, AD-1397172.1, AD-1397173.1, AD-1397174.1, AD-1397175.1, AD-1397176.1, AD-1397177.1, AD-1397178.1, AD-1397179.1, AD-1397180.1, AD-1397181.1, AD-1397182.1, AD-1397183.1, AD-1397184.1, AD-1397185.1, AD-1397186.1, AD-1397187.1, AD-1397188.1, AD-1397189.1, AD-1397190.1, AD-1397191.1, AD-1397192.1, AD-1397193.1, AD-1397194.1, AD-1397195.1, AD-1397196.1, AD-1397197.1, AD-1397198.1, AD-1397199.1, AD-1397200.1, AD-1397201.1, AD-1397202.1, AD-1397203.1, AD-1397204.1, AD-1397205.1, AD-1397206.1, AD-1397207.1, AD-1397208.1, AD-1397209.1, AD-1397210.1, AD-1397211.1, AD-1397212.1, AD-1397213.1, AD-1397214.1, AD-1397215.1, AD-1397216.1, AD-1397217.1, AD-1397218.1, AD-1397219.1, AD-1397220.1, AD-1397221.1, AD-1397222.1, AD-1397223.1, AD-1397224.1, AD-1397225.1, AD-1397226.1, AD-1397227.1, AD-1397228.1, AD-1397229.1, AD-1397230.1, AD-1397231.1, AD-1397232.1, AD-1397233.1, AD-1397234.1, AD-1397235.1, AD-1397236.1, AD-1397237.1, AD-1397238.1, AD-1397239.1, AD-1397240.1, AD-1397241.1, AD-1397242.1, AD-1397243.1, AD-1397244.1, AD-1397245.1, AD-1397246.1, AD-1397247.1, AD-1397248.1, AD-1397249.1, AD-523565.1, AD-1397072.3, AD-1397073.3, AD-1397076.3, AD-1397077.3, AD-1397078.3, AD-1397252.2, AD-1397257.2, AD-1397258.2, AD-1397259.2, AD-1397263.2, AD-1397264.2, AD-1397309.2, AD-64958.114, AD-393758.4, AD-1397080.3, AD-1397293.2, AD-1397294.2, AD-1397081.3, AD-1397083.3, AD-1397298.2, AD-1397299.2, AD-1397084.2, AD-1397085.2, AD-1397087.3, AD-1397306.2, AD-1397307.2, AD-1397308.2 and AD-1397088.2.

[0210] In one embodiment, at least partial suppression of the expression of a MAPT gene, is assessed by a reduction of the amount of MAPT mRNA, e.g., sense mRNA, antisense mRNA, total MAPT mRNA, which can be isolated from or detected in a first cell or group of cells in which a MAPT gene is transcribed and which has or have been treated such that the expression of a MAPT gene is inhibited, as compared to a second cell or group of cells substantially identical to the first cell or group of cells but which has or have not been so treated (control cells). The degree of inhibition may be expressed in terms of:

$$\frac{( mRNA in control cells ) - ( mRNA in treated cells )}{( mRNA in control cells )} \times 100$$

[0211] The phrase “contacting a cell with an RNAi agent,” such as a dsRNA, as used herein, includes contacting a cell by any possible means. Contacting a cell with an RNAi agent includes contacting a cell in vitro with the RNAi agent or contacting a cell in vivo with the RNAi agent. The contacting may be done directly or indirectly. Thus, for example, the RNAi agent may be put into physical contact with the cell by the individual performing the method, or alternatively, the RNAi agent may be put into a situation that will permit or cause it to subsequently come into contact with the cell.

[0212] Contacting a cell in vitro may be done, for example, by incubating the cell with the RNAi agent. Contacting a cell in vivo may be done, for example, by injecting the RNAi agent into or near the tissue where the cell is located, or by injecting the RNAi agent into another area, e.g., the central nervous system (CNS), optionally via intrathecal, intravitreal, intracisternal or other injection, or to the bloodstream or the subcutaneous space, such that the agent will subsequently reach the tissue where the cell to be contacted is located. For example, the RNAi agent may contain or be coupled to a ligand, e.g., a lipophilic moiety or moieties as described below and further detailed, e.g., in PCT/US2019/031170, which is incorporated herein by reference, that directs or otherwise stabilizes the RNAi agent at a site of interest, e.g., the CNS. Combinations of in vitro and in vivo methods of contacting are also possible. For example, a cell may also be contacted in vitro with an RNAi agent and subsequently transplanted into a subject.

[0213] In one embodiment, contacting a cell with an RNAi agent includes “introducing” or “delivering the RNAi agent into the cell” by facilitating or effecting uptake or absorption into the cell. Absorption or uptake of an RNAi agent can occur through unaided diffusive or active cellular processes, or by auxiliary agents or devices. Introducing an RNAi agent into a cell may be in vitro or in vivo. For example, for in vivo introduction, an RNAi agent can be injected into a tissue site or administered systemically. In vitro introduction into a cell includes methods known in the art such as electroporation and lipofection. Further approaches are described herein below or are known in the art.

[0214] The term “lipophile” or “lipophilic moiety” broadly refers to any compound or chemical moiety having an affinity for lipids. One way to characterize the lipophilicity of the lipophilic moiety is by the octanol-water partition coefficient, logK_{ow}, where K_{ow} is the ratio of a chemical's concentration in the octanol-phase to its concentration in the aqueous phase of a two-phase system at equilibrium. The octanol-water partition coefficient is a laboratory-measured property of a substance. However, it may also be predicted by using coefficients attributed to the structural components of a chemical which are calculated using first-principle or empirical methods (see, for example, Tetko et al., J. Chem. Inf Comput. Sci. 41:1407-21 (2001), which is incorporated herein by reference in its entirety). It provides a thermodynamic measure of the tendency of the substance to prefer a non-aqueous or oily milieu rather than water (i.e. its hydrophilic/lipophilic balance). In principle, a chemical substance is lipophilic in character when its logK_{ow} exceeds 0. Typically, the lipophilic moiety possesses a logK_{ow} exceeding 1, exceeding 1.5, exceeding 2, exceeding 3, exceeding 4, exceeding 5, or exceeding 10. For instance, the logK_{ow} of 6-amino hexanol, for instance, is predicted to be approximately 0.7. Using the same method, the logK_{ow} of cholesteryl N-(hexan-6-ol) carbamate is predicted to be 10.7.

[0215] The lipophilicity of a molecule can change with respect to the functional group it carries. For instance, adding a hydroxyl group or amine group to the end of a lipophilic moiety can increase or decrease the partition coefficient (e.g., logK_{ow}) value of the lipophilic moiety.

[0216] Alternatively, the hydrophobicity of the double-stranded RNAi agent, conjugated to one or more lipophilic moieties, can be measured by its protein binding characteristics. For instance, in certain embodiments, the unbound fraction in the plasma protein binding assay of the double-stranded RNAi agent could be determined to positively correlate to the relative hydrophobicity of the double-stranded RNAi agent, which could then positively correlate to the silencing activity of the double-stranded RNAi agent.

[0217] In one embodiment, the plasma protein binding assay determined is an electrophoretic mobility shift assay (EMSA) using human serum albumin protein. An exemplary protocol of this binding assay is illustrated in detail in, e.g., PCT/US2019/031170. Briefly, duplexes were incubated with human serum albumin and the unbound fraction was determined. Exemplary assay protocol includes duplexes at a stock concentration of 10 μM, diluted to a final concentration of 0.5 μM (20 μL total volume) containing 0, 20, or 90% serum in lx PBS. The samples can be mixed, centrifuged for 30 seconds, and subsequently incubated at room temperature for 10 minutes. Once incubation step is completed, 4 μL of 6× EMSA Gel-loading solution can be added to each sample, centrifuged for 30 seconds, and 12 μL of each sample can be loaded onto a 26 well BioRad 10% PAGE (polyacrylamide gel electrophoresis). The gel can be run for 1 hour at 100 volts. After completion of the run, the gel is removed from the casing and washed in 50 mL of 10% TBE (Tris base, boric acid and EDTA). Once washing is complete, 5 μL of SYBR Gold can be added to the gel, which is then allowed to incubate at room temperature for 10 minutes, and the gel-washed again in 50 mL of 10% TBE. In this exemplary assay, a Gel Doc XR+ gel documentation system may be used to read the gel using the following parameters: the imaging application set to SYBR Gold, the size set to Bio-Rad criterion gel, the exposure set to automatic for intense bands, the highlight saturated pixels may be turned one and the color is set to gray. The detection, molecular weight analysis, and output can all disabled. Once a clean photo of the gel is obtained Image Lab 5.2 may be used to process the image. The lanes and bands can be manually set to measure band intensity. Band intensities of each sample can be normalized to PBS to obtain the fraction of unbound siRNA. From this measurement relative hydrophobicity can determined. The hydrophobicity of the double-stranded RNAi agent, measured by fraction of unbound siRNA in the binding assay, exceeds 0.15, exceeds 0.2, exceeds 0.25, exceeds 0.3, exceeds 0.35, exceeds 0.4, exceeds 0.45, or exceeds 0.5 for an enhanced in vivo delivery of siRNA.

[0218] Accordingly, conjugating the lipophilic moieties to the internal position(s) of the double-stranded RNAi agent provides optimal hydrophobicity for the enhanced in vivo delivery of siRNA.

[0219] The term “lipid nanoparticle” or “LNP” is a vesicle comprising a lipid layer encapsulating a pharmaceutically active molecule, such as a nucleic acid molecule, e.g., a RNAi agent or a plasmid from which an RNAi agent is transcribed. LNPs are described in, for example, U.S. Pat. Nos. 6,858,225, 6,815,432, 8,158,601, and 8,058,069, the entire contents of which are hereby incorporated herein by reference.

[0220] As used herein, a “subject” is an animal, such as a mammal, including a primate (such as a human, a non-human primate, e.g., a monkey, and a chimpanzee), or a non-primate (such as a rat, or a mouse). In a preferred embodiment, the subject is a human, such as a human being treated or assessed for a disease, disorder, or condition that would benefit from reduction in MAPT expression; a human at risk for a disease, disorder, or condition that would benefit from reduction in MAPT expression; a human having a disease, disorder, or condition that would benefit from reduction in MAPT expression; or human being treated for a disease, disorder, or condition that would benefit from reduction in MAPT expression as described herein. In some embodiments, the subject is a female human. In other embodiments, the subject is a male human. In one embodiment, the subject is an adult subject. In one embodiment, the subject is a pediatric subject. In another embodiment, the subject is a juvenile subject, i.e., a subject below 20 years of age.

[0221] As used herein, the terms “treating” or “treatment” refer to a beneficial or desired result including, but not limited to, alleviation or amelioration of one or more signs or symptoms associated with MAPT gene expression or Tau production in MAPT-associated diseases, such as Alzheimer's disease, FTD, PSP, or other tauopathies. “Treatment” can also mean prolonging survival as compared to expected survival in the absence of treatment.

[0222] The term “lower” in the context of the level of MAPT in a subject or a disease marker or symptom refers to a statistically significant decrease in such level. The decrease can be, for example, at least 10%, 15%, 20%, 25%, 30%, %, 40%, 45%, 50%, 55%, 60%, 65%, 70%, 75%, 80%, 85%, 90%, 95%, or more. In certain embodiments, a decrease is at least 20%. In certain embodiments, the decrease is at least 50% in a disease marker, e.g., the level of sense- or antisense-containing foci and/or the level of aberrant dipeptide repeat protein, e.g., a decrease of 50%, 55%, 60%, 65%, 70%, 75%, 80%, 85%, 90%, 95%, or more. In some embodiments, a decrease is at least about 25% in a disease marker, e.g., Tau protein and/or gene expression level is decreased by, e.g., at least about 25%, at least about 30%, at least about 40%, at least about 50%, at least about 60%, at least about 70%, at least about 80%, at least about 90%, or at least about 95% “Lower” in the context of the level of MAPT in a subject is preferably down to a level accepted as within the range of normal for an individual without such disorder. In certain embodiments, “lower” is the decrease in the difference between the level of a marker or symptom for a subject suffering from a disease and a level accepted within the range of normal for an individual, e.g., the level of decrease in bodyweight between an obese individual and an individual having a weight accepted within the range of normal.

[0223] As used herein, “prevention” or “preventing,” when used in reference to a disease, disorder, or condition thereof, that would benefit from a reduction in expression of a MAPT gene or production of a Tau, refers to a reduction in the likelihood that a subject will develop a symptom associated with such a disease, disorder, or condition, e.g., a symptom of a MAPT-associated disease. The failure to develop a disease, disorder, or condition, or the reduction in the development of a symptom associated with such a disease, disorder, or condition (e.g., by at least about 10% on a clinically accepted scale for that disease or disorder), or the exhibition of delayed symptoms delayed (e.g., by days, weeks, months or years) is considered effective prevention.

[0224] As used herein, the term “MAPT-associated disease” or “MAPT-associated disorder” or “tauopathy” includes any disease or disorder that would benefit from reduction in the expression and/or activity of MAPT. Exemplary MAPT-associated diseases include Alzheimer disease, frontotemporal dementia (FTD), behavioral variant frontotemporal dementia (bvFTD), nonfluent variant primary progressive aphasia (nfvPPA), primary progressive aphasia-semantic (PPA-S), primary progressive aphasia-logopenic (PPA-L), frontotemporal dementia with parkinsonism linked to chromosome 17 (FTDP-17), Pick's disease (PiD), argyrophilic grain disease (AGD), multiple system tauopathy with presenile dementia (MSTD), white matter tauopathy with globular glial inclusions (FTLD with GGIs), FTLD with MAPT mutations, neurofibrillary tangle (NFT) dementia, FTD with motor neuron disease, amyotrophic lateral sclerosis (ALS), corticobasal syndrome (CBS), corticobasal degeneration (CBD), progressive supranuclear palsy (PSP), Parkinson's disease, postencephalitic Parkinsonism, Niemann-Pick disease, Huntington disease, type 1 myotonic dystrophy, and Down syndrome (DS).

[0225] “Therapeutically effective amount,” as used herein, is intended to include the amount of an RNAi agent that, when administered to a subject having a MAPT-associated disease, is sufficient to effect treatment of the disease (e.g., by diminishing, ameliorating, or maintaining the existing disease or one or more symptoms of disease). The “therapeutically effective amount” may vary depending on the RNAi agent, how the agent is administered, the disease and its severity and the history, age, weight, family history, genetic makeup, the types of preceding or concomitant treatments, if any, and other individual characteristics of the subject to be treated.

[0226] “Prophylactically effective amount,” as used herein, is intended to include the amount of an RNAi agent that, when administered to a subject having a MAPT-associated disorder, is sufficient to prevent or ameliorate the disease or one or more symptoms of the disease. Ameliorating the disease includes slowing the course of the disease or reducing the severity of later-developing disease. The “prophylactically effective amount” may vary depending on the RNAi agent, how the agent is administered, the degree of risk of disease, and the history, age, weight, family history, genetic makeup, the types of preceding or concomitant treatments, if any, and other individual characteristics of the patient to be treated.

[0227] A “therapeutically-effective amount” or “prophylactically effective amount” also includes an amount of an RNAi agent that produces some desired local or systemic effect at a reasonable benefit/risk ratio applicable to any treatment. An RNAi agent employed in the methods of the present disclosure may be administered in a sufficient amount to produce a reasonable benefit/risk ratio applicable to such treatment.

[0228] The phrase “pharmaceutically acceptable” is employed herein to refer to those compounds, materials, compositions, or dosage forms which are, within the scope of sound medical judgment, suitable for use in contact with the tissues of human subjects and animal subjects without excessive toxicity, irritation, allergic response, or other problem or complication, commensurate with a reasonable benefit/risk ratio.

[0229] The phrase “pharmaceutically-acceptable carrier” as used herein means a pharmaceutically-acceptable material, composition or vehicle, such as a liquid or solid filler, diluent, excipient, manufacturing aid (e.g., lubricant, talc magnesium, calcium or zinc stearate, or steric acid), or solvent encapsulating material, involved in carrying or transporting the subject compound from one organ, or portion of the body, to another organ, or portion of the body. Each carrier must be “acceptable” in the sense of being compatible with the other ingredients of the formulation and not injurious to the subject being treated. Some examples of materials which can serve as pharmaceutically-acceptable carriers include: (1) sugars, such as lactose, glucose and sucrose; (2) starches, such as corn starch and potato starch; (3) cellulose, and its derivatives, such as sodium carboxymethyl cellulose, ethyl cellulose and cellulose acetate; (4) powdered tragacanth; (5) malt; (6) gelatin; (7) lubricating agents, such as magnesium state, sodium lauryl sulfate and talc; (8) excipients, such as cocoa butter and suppository waxes; (9) oils, such as peanut oil, cottonseed oil, safflower oil, sesame oil, olive oil, corn oil and soybean oil; (10) glycols, such as propylene glycol; (11) polyols, such as glycerin, sorbitol, mannitol and polyethylene glycol; (12) esters, such as ethyl oleate and ethyl laurate; (13) agar; (14) buffering agents, such as magnesium hydroxide and aluminum hydroxide; (15) alginic acid; (16) pyrogen-free water; (17) isotonic saline; (18) Ringer's solution; (19) ethyl alcohol; (20) pH buffered solutions; (21) polyesters, polycarbonates or polyanhydrides; (22) bulking agents, such as polypeptides and amino acids (23) serum component, such as serum albumin, HDL and LDL; and (22) other non-toxic compatible substances employed in pharmaceutical formulations.

[0230] The term “sample,” as used herein, includes a collection of similar fluids, cells, or tissues isolated from a subject, as well as fluids, cells, or tissues present within a subject. Examples of biological fluids include blood, serum and serosal fluids, plasma, cerebrospinal fluid, ocular fluids, lymph, urine, saliva, and the like. Tissue samples may include samples from tissues, organs or localized regions. For example, samples may be derived from particular organs, parts of organs, or fluids or cells within those organs. In certain embodiments, samples may be derived from the brain (e.g., whole brain or certain segments of brain, e.g., striatum, or certain types of cells in the brain, such as, e.g., neurons and glial cells (astrocytes, oligodendrocytes, microglial cells)). In some embodiments, a “sample derived from a subject” refers to blood drawn from the subject or plasma or serum derived therefrom. In further embodiments, a “sample derived from a subject” refers to brain tissue (or subcomponents thereof) or retinal tissue (or subcomponents thereof) derived from the subject.

[0231] The term “substituted” refers to the replacement of one or more hydrogen radicals in a given structure with the radical of a specified substituent including, but not limited to: alkyl, alkenyl, alkynyl, aryl, heterocyclyl, halo, thiol, alkylthio, arylthio, alkylthioalkyl, arylthioalkyl, alkylsulfonyl, alkylsulfonylalkyl, arylsulfonylalkyl, alkoxy, aryloxy, aralkoxy, aminocarbonyl, alkylaminocarbonyl, arylaminocarbonyl, alkoxycarbonyl, aryloxycarbonyl, haloalkyl, amino, trifluoromethyl, cyano, nitro, alkylamino, arylamino, alkylaminoalkyl, arylaminoalkyl, aminoalkylamino, hydroxy, alkoxyalkyl, carboxyalkyl, alkoxycarbonylalkyl, aminocarbonylalkyl, acyl, aralkoxycarbonyl, carboxylic acid, sulfonic acid, sulfonyl, phosphonic acid, aryl, heteroaryl, heterocyclic, and aliphatic. It is understood that the substituent can be further substituted.

[0232] The term “alkyl” refers to saturated and unsaturated non-aromatic hydrocarbon chains that may be a straight chain or branched chain, containing the indicated number of carbon atoms (these include without limitation propyl, allyl, or propargyl), which may be optionally inserted with N, O, or S. For example, “(C1-C6) alkyl” means a radical having from 1 6 carbon atoms in a linear or branched arrangement. “(C1-C6) alkyl” includes, for example, methyl, ethyl, propyl, iso-propyl, n-butyl, tert-butyl, pentyl and hexyl. In certain embodiments, a lipophilic moiety of the instant disclosure can include a C6-C18 alkyl hydrocarbon chain.

[0233] The term “alkylene” refers to an optionally substituted saturated aliphatic branched or straight chain divalent hydrocarbon radical having the specified number of carbon atoms. For example, “(C1-C6) alkylene” means a divalent saturated aliphatic radical having from 1-6 carbon atoms in a linear arrangement, e.g., [(CH₂)ₙ], where n is an integer from 1 to 6. “(C1-C6) alkylene” includes methylene, ethylene, propylene, butylene, pentylene and hexylene. Alternatively, “(C1-C6) alkylene” means a divalent saturated radical having from 1-6 carbon atoms in a branched arrangement, for example: [(CH₂CH₂CH₂CH₂CH(CH₃)], [(CH₂CH₂CH₂CH₂C(CH₃)₂], [(CH₂C(CH₃)₂CH(CH₃))], and the like. The term “alkylenedioxo” refers to a divalent species of the structure —O—R—O—, in which R represents an alkylene.

[0234] The term “mercapto” refers to an —SH radical. The term “thioalkoxy” refers to an —S— alkyl radical.

[0235] The term “halo” refers to any radical of fluorine, chlorine, bromine or iodine. “Halogen” and “halo” are used interchangeably herein.

[0236] As used herein, the term “cycloalkyl” means a saturated or unsaturated nonaromatic hydrocarbon ring group having from 3 to 14 carbon atoms, unless otherwise specified. For example, “(C3-C10) cycloalkyl” means a hydrocarbon radical of a (3-10)-membered saturated aliphatic cyclic hydrocarbon ring. Examples of cycloalkyl groups include, but are not limited to, cyclopropyl, methyl-cyclopropyl, 2,2-dimethyl-cyclobutyl, 2-ethyl-cyclopentyl, cyclohexyl, etc. Cycloalkyls may include multiple spiro- or fused rings. Cycloalkyl groups are optionally mono-, di-, tri-, tetra-, or penta-substituted on any position as permitted by normal valency.

[0237] As used herein, the term “alkenyl” refers to a non-aromatic hydrocarbon radical, straight or branched, containing at least one carbon-carbon double bond, and having from 2 to 10 carbon atoms unless otherwise specified. Up to five carbon-carbon double bonds may be present in such groups. For example, “C2-C6” alkenyl is defined as an alkenyl radical having from 2 to 6 carbon atoms. Examples of alkenyl groups include, but are not limited to, ethenyl, propenyl, butenyl, and cyclohexenyl. The straight, branched, or cyclic portion of the alkenyl group may contain double bonds and is optionally mono-, di-, tri-, tetra-, or penta-substituted on any position as permitted by normal valency. The term “cycloalkenyl” means a monocyclic hydrocarbon group having the specified number of carbon atoms and at least one carbon-carbon double bond.

[0238] As used herein, the term “alkynyl” refers to a hydrocarbon radical, straight or branched, containing from 2 to 10 carbon atoms, unless otherwise specified, and containing at least one carbon-carbon triple bond. Up to 5 carbon-carbon triple bonds may be present. Thus, “C2-C6 alkynyl” means an alkynyl radical having from 2 to 6 carbon atoms. Examples of alkynyl groups include, but are not limited to, ethynyl, 2-propynyl, and 2-butynyl. The straight or branched portion of the alkynyl group may contain triple bonds as permitted by normal valency, and may be optionally mono-, di-, tri-, tetra-, or penta-substituted on any position as permitted by normal valency.

[0239] As used herein, “alkoxyl” or “alkoxy” refers to an alkyl group as defined above with the indicated number of carbon atoms attached through an oxygen bridge. For example, “(C1-C3)alkoxy” includes methoxy, ethoxy and propoxy. For example, “(C1-C6)alkoxy”, is intended to include C1, C2, C3, C4, C5, and C6 alkoxy groups. For example, “(C1-C8)alkoxy”, is intended to include C1, C2, C3, C4, C5, C6, C7, and C8 alkoxy groups. Examples of alkoxy include, but are not limited to, methoxy, ethoxy, n-propoxy, i-propoxy, n-butoxy, s-butoxy, t-butoxy, n-pentoxy, s-pentoxy, n-heptoxy, and n-octoxy. “Alkylthio” means an alkyl radical attached through a sulfur linking atom. The terms “alkylamino” or “aminoalkyl”, means an alkyl radical attached through an NH linkage. “Dialkylamino” means two alkyl radical attached through a nitrogen linking atom. The amino groups may be unsubstituted, monosubstituted, or di-substituted. In some embodiments, the two alkyl radicals are the same (e.g., N,N-dimethylamino). In some embodiments, the two alkyl radicals are different (e.g., N-ethyl-N-methylamino).

[0240] As used herein, “aryl” or “aromatic” means any stable monocyclic or polycyclic carbon ring of up to 7 atoms in each ring, wherein at least one ring is aromatic. Examples of aryl groups include, but are not limited to, phenyl, naphthyl, anthracenyl, tetrahydronaphthyl, indanyl, and biphenyl. In cases where the aryl substituent is bicyclic and one ring is non-aromatic, it is understood that attachment is via the aromatic ring. Aryl groups are optionally mono-, di-, tri-, tetra-, or penta-substituted on any position as permitted by normal valency. The term “arylalkyl” or the term “aralkyl” refers to alkyl substituted with an aryl. The term “arylalkoxy” refers to an alkoxy substituted with aryl.

[0241] “Hetero” refers to the replacement of at least one carbon atom in a ring system with at least one heteroatom selected from N, S and O. “Hetero” also refers to the replacement of at least one carbon atom in an acyclic system. A hetero ring system or a hetero acyclic system may have, for example, 1, 2 or 3 carbon atoms replaced by a heteroatom.

[0242] As used herein, the term “heteroaryl” represents a stable monocyclic or polycyclic ring of up to 7 atoms in each ring, wherein at least one ring is aromatic and contains from 1 to 4 heteroatoms selected from the group consisting of O, N and S. Examples of heteroaryl groups include, but are not limited to, acridinyl, carbazolyl, cinnolinyl, quinoxalinyl, pyrrazolyl, indolyl, benzotriazolyl, furanyl, thienyl, benzothienyl, benzofuranyl, benzimidazolonyl, benzoxazolonyl, quinolinyl, isoquinolinyl, dihydroisoindolonyl, imidazopyridinyl, isoindolonyl, indazolyl, oxazolyl, oxadiazolyl, isoxazolyl, indolyl, pyrazinyl, pyridazinyl, pyridinyl, pyrimidinyl, pyrrolyl, tetrahydroquinoline. “Heteroaryl” is also understood to include the N-oxide derivative of any nitrogen-containing heteroaryl. In cases where the heteroaryl substituent is bicyclic and one ring is non-aromatic or contains no heteroatoms, it is understood that attachment is via the aromatic ring or via the heteroatom containing ring.

[0243] Heteroaryl groups are optionally mono-, di-, tri-, tetra-, or penta-substituted on any position as permitted by normal valency.

[0244] As used herein, the term “heterocycle,” “heterocyclic,” or “heterocyclyl” means a 3- to 14-membered aromatic or nonaromatic heterocycle containing from 1 to 4 heteroatoms selected from the group consisting of O, N and S, including polycyclic groups. As used herein, the term “heterocyclic” is also considered to be synonymous with the terms “heterocycle” and “heterocyclyl” and is understood as also having the same definitions set forth herein. “Heterocyclyl” includes the above mentioned heteroaryls, as well as dihydro and tetrahydro analogs thereof. Examples of heterocyclyl groups include, but are not limited to, azetidinyl, benzoimidazolyl, benzofuranyl, benzofurazanyl, benzopyrazolyl, benzotriazolyl, benzothiophenyl, benzoxazolyl, carbazolyl, carbolinyl, cinnolinyl, furanyl, imidazolyl, indolinyl, indolyl, indolazinyl, indazolyl, isobenzofuranyl, isoindolyl, isoquinolyl, isothiazolyl, isoxazolyl, naphthpyridinyl, oxadiazolyl, oxooxazolidinyl, oxazolyl, oxazoline, oxopiperazinyl, oxopyrrolidinyl, oxomorpholinyl, isoxazoline, oxetanyl, pyranyl, pyrazinyl, pyrazolyl, pyridazinyl, pyridopyridinyl, pyridazinyl, pyridyl, pyridinonyl, pyrimidyl, pyrimidinonyl, pyrrolyl, quinazolinyl, quinolyl, quinoxalinyl, tetrahydropyranyl, tetrahydrofuranyl, tetrahydrothiopyranyl, tetrahydroisoquinolinyl, tetrazolyl, tetrazolopyridyl, thiadiazolyl, thiazolyl, thienyl, triazolyl, 1,4-dioxanyl, hexahydroazepinyl, piperazinyl, piperidinyl, pyridin-2-onyl, pyrrolidinyl, morpholinyl, thiomorpholinyl, dihydrobenzoimidazolyl, dihydrobenzofuranyl, dihydrobenzothiophenyl, dihydrobenzoxazolyl, dihydrofuranyl, dihydroimidazolyl, dihydroindolyl, dihydroisooxazolyl, dihydroisothiazolyl, dihydrooxadiazolyl, dihydrooxazolyl, dihydropyrazinyl, dihydropyrazolyl, dihydropyridinyl, dihydropyrimidinyl, dihydropyrrolyl, dihydroquinolinyl, dihydrotetrazolyl, dihydrothiadiazolyl, dihydrothiazolyl, dihydrothienyl, dihydrotriazolyl, dihydroazetidinyl, dioxidothiomorpholinyl, methylenedioxybenzoyl, tetrahydrofuranyl, and tetrahydrothienyl, and N-oxides thereof. Attachment of a heterocyclyl substituent can occur via a carbon atom or via a heteroatom. Heterocyclyl groups are optionally mono-, di-, tri-, tetra-, or penta-substituted on any position as permitted by normal valency.

[0245] “Heterocycloalkyl” refers to a cycloalkyl residue in which one to four of the carbons is replaced by a heteroatom such as oxygen, nitrogen or sulfur. Examples of heterocycles whose radicals are heterocyclyl groups include tetrahydropyran, morpholine, pyrrolidine, piperidine, thiazolidine, oxazole, oxazoline, isoxazole, dioxane, tetrahydrofuran and the like.

[0246] The term “heteroaryl” refers to an aromatic 5-8 membered monocyclic, 8-12 membered bicyclic, or 11-14 membered tricyclic ring system having 1-3 heteroatoms if monocyclic, 1-6 heteroatoms if bicyclic, or 1-9 heteroatoms if tricyclic, said heteroatoms selected from O, N, or S (e.g., carbon atoms and 1-3, 1-6, or 1-9 heteroatoms of N, O, or S if monocyclic, bicyclic, or tricyclic, respectively), wherein 0, 1, 2, 3, or 4 atoms of each ring may be substituted by a substituent. Examples of heteroaryl groups include pyridyl, furyl or furanyl, imidazolyl, benzimidazolyl, pyrimidinyl, thiophenyl or thienyl, quinolinyl, indolyl, thiazolyl, and the like. The term “heteroarylalkyl” or the term “heteroaralkyl” refers to an alkyl substituted with a heteroaryl. The term “heteroarylalkoxy” refers to an alkoxy substituted with heteroaryl.

[0247] The term “cycloalkyl” as employed herein includes saturated and partially unsaturated cyclic hydrocarbon groups having 3 to 12 carbons, for example, 3 to 8 carbons, and, for example, 3 to 6 carbons, wherein the cycloalkyl group additionally may be optionally substituted. Cycloalkyl groups include, without limitation, cyclopropyl, cyclobutyl, cyclopentyl, cyclopentenyl, cyclohexyl, cyclohexenyl, cycloheptyl, and cyclooctyl.

[0248] The term “acyl” refers to an alkylcarbonyl, cycloalkylcarbonyl, arylcarbonyl, heterocyclylcarbonyl, or heteroarylcarbonyl substituent, any of which may be further substituted by substituents.

[0249] As used herein, “keto” refers to any alkyl, alkenyl, alkynyl, cycloalkyl, cycloalkenyl, heterocyclyl, heteroaryl, or aryl group as defined herein attached through a carbonyl bridge.

[0250] Examples of keto groups include, but are not limited to, alkanoyl (e.g., acetyl, propionyl, butanoyl, pentanoyl, hexanoyl), alkenoyl (e.g., acryloyl) alkynoyl (e.g., ethynoyl, propynoyl, butynoyl, pentynoyl, hexynoyl), aryloyl (e.g., benzoyl), heteroaryloyl (e.g., pyrroloyl, imidazoloyl, quinolinoyl, pyridinoyl).

[0251] As used herein, “alkoxycarbonyl” refers to any alkoxy group as defined above attached through a carbonyl bridge (i.e., —C(O)O-alkyl). Examples of alkoxycarbonyl groups include, but are not limited to, methoxycarbonyl, ethoxycarbonyl, iso-propoxycarbonyl, n-propoxycarbonyl, t-butoxycarbonyl, benzyloxycarbonyl or n-pentoxycarbonyl.

[0252] As used herein, “aryloxycarbonyl” refers to any aryl group as defined herein attached through an oxycarbonyl bridge (i.e., —C(O)O-aryl). Examples of aryloxycarbonyl groups include, but are not limited to, phenoxycarbonyl and naphthyloxycarbonyl.

[0253] As used herein, “heteroaryloxycarbonyl” refers to any heteroaryl group as defined herein attached through an oxycarbonyl bridge (i.e., —C(O)O-heteroaryl). Examples of heteroaryloxycarbonyl groups include, but are not limited to, 2-pyridyloxycarbonyl, 2-oxazolyloxycarbonyl, 4-thiazolyloxycarbonyl, or pyrimidinyloxycarbonyl.

[0254] The term “oxo” refers to an oxygen atom, which forms a carbonyl when attached to carbon, an N-oxide when attached to nitrogen, and a sulfoxide or sulfone when attached to sulfur.

[0255] The person of ordinary skill in the art would readily understand and appreciate that the compounds and compositions disclosed herein may have certain atoms (e.g., N, O, or S atoms) in a protonated or deprotonated state, depending upon the environment in which the compound or composition is placed. Accordingly, as used herein, the structures disclosed herein envisage that certain functional groups, such as, for example, OH, SH, or NH, may be protonated or deprotonated. The disclosure herein is intended to cover the disclosed compounds and compositions regardless of their state of protonation based on the pH of the environment, as would be readily understood by the person of ordinary skill in the art.

### II. RNAi Agents of the Disclosure

[0256] Described herein are RNAi agents which inhibit the expression of a MAPT gene. In one embodiment, the RNAi agent includes double stranded ribonucleic acid (dsRNA) molecules for inhibiting the expression of a MAPT gene in a cell, such as a cell within a subject, e.g., a mammal, such as a human having a MAPT-associated disease, e.g., Alzheimer's disease, FTD, PSP, or another tauopathy. The dsRNA includes an antisense strand having a region of complementarity which is complementary to at least a part of an mRNA formed in the expression of a MAPT gene. The region of complementarity is about 15-30 nucleotides or less in length. Upon contact with a cell expressing the MAPT gene, the RNAi agent inhibits the expression of the MAPT gene (e.g., a human gene, a primate gene, a non-primate gene) by at least 25%, or higher as described herein, when compared to a similar cell not contacted with the RNAi agent or an RNAi agent not complementary to the MAPT gene. Expression of the MAPT gene may be assayed by, for example, a PCR or branched DNA (bDNA)-based method, or by a protein-based method, such as by immunofluorescence analysis, using, for example, western blotting or flowcytometric techniques. In one embodiment, the level of knockdown is assayed in BE (2)-C cells using an assay method provided in Example 1 below. In some embodiments, the level of knockdown is assayed in primary mouse hepatocytes. In some embodiments, the level of knockdown is assayed in Neuro-2a cells.

[0257] A dsRNA includes two RNA strands that are complementary and hybridize to form a duplex structure under conditions in which the dsRNA will be used. One strand of a dsRNA (the antisense strand) includes a region of complementarity that is substantially complementary, and generally fully complementary, to a target sequence. The target sequence can be derived from the sequence of an mRNA formed during the expression of a MAPT gene. The other strand (the sense strand) includes a region that is complementary to the antisense strand, such that the two strands hybridize and form a duplex structure when combined under suitable conditions. As described elsewhere herein and as known in the art, the complementary sequences of a dsRNA can also be contained as self-complementary regions of a single nucleic acid molecule, as opposed to being on separate oligonucleotides.

[0258] Generally, the duplex structure is 15 to 30 base pairs in length, e.g., 15-29, 15-28, 15-27, 15-26, 15-25, 15-24, 15-23, 15-22, 15-21, 15-20, 15-19, 15-18, 15-17, 18-30, 18-29, 18-28, 18-27, 18-26, 18-25, 18-24, 18-23, 18-22, 18-21, 18-20, 19-30, 19-29, 19-28, 19-27, 19-26, 19-25, 19-24, 19-23, 19-22, 19-21, 19-20, 20-30, 20-29, 20-28, 20-27, 20-26, 20-25, 20-24,20-23, 20-22, 20-21, 21-30, 21-29, 21-28, 21-27, 21-26, 21-25, 21-24, 21-23, or 21-22 base pairs in length. In certain preferred embodiments, the duplex structure is 18 to 25 base pairs in length, e.g., 18-25, 18-24, 18-23, 18-22, 18-21, 18-20, 19-25, 19-24, 19-23, 19-22, 19-21, 19-20, 20-25, 20-24,20-23, 20-22, 20-21, 21-25, 21-24, 21-23, 21-22, 22-25, 22-24, 22-23, 23-25, 23-24 or 24-25 base pairs in length, for example, 19-21 basepairs in length. Ranges and lengths intermediate to the above recited ranges and lengths are also contemplated to be part of the disclosure.

[0259] Similarly, the region of complementarity to the target sequence is 15 to 30 nucleotides in length, e.g., 15-29, 15-28, 15-27, 15-26, 15-25, 15-24, 15-23, 15-22, 15-21, 15-20, 15-19, 15-18, 15-17, 18-30, 18-29, 18-28, 18-27, 18-26, 18-25, 18-24, 18-23, 18-22, 18-21, 18-20, 19-30, 19-29, 19-28, 19-27, 19-26, 19-25, 19-24, 19-23, 19-22, 19-21, 19-20, 20-30, 20-29, 20-28, 20-27, 20-26, 20-25, 20-24,20-23, 20-22, 20-21, 21-30, 21-29, 21-28, 21-27, 21-26, 21-25, 21-24, 21-23, or 21-22 nucleotides in length, for example 19-23 nucleotides in length or 21-23 nucleotides in length. Ranges and lengths intermediate to the above recited ranges and lengths are also contemplated to be part of the disclosure.

[0260] In some embodiments, the duplex structure is 19 to 30 base pairs in length. Similarly, the region of complementarity to the target sequence is 19 to 30 nucleotides in length.

[0261] In some embodiments, the dsRNA is 15 to 23 nucleotides in length, 19 to 23 nucleotides in length, or 25 to 30 nucleotides in length. In general, the dsRNA is long enough to serve as a substrate for the Dicer enzyme. For example, it is well known in the art that dsRNAs longer than about 21-23 nucleotides can serve as substrates for Dicer. As the ordinarily skilled person will also recognize, the region of an RNA targeted for cleavage will most often be part of a larger RNA molecule, often an mRNA molecule. Where relevant, a “part” of an mRNA target is a contiguous sequence of an mRNA target of sufficient length to allow it to be a substrate for RNAi-directed cleavage (i.e., cleavage through a RISC pathway).

[0262] One of skill in the art will also recognize that the duplex region is a primary functional portion of a dsRNA, e.g., a duplex region of about 15 to 36 base pairs, e.g., 15-36, 15-35, 15-34, 15-33, 15-32, 15-31, 15-30, 15-29, 15-28, 15-27, 15-26, 15-25, 15-24, 15-23, 15-22, 15-21, 15-20, 15-19, 15-18, 15-17, 18-30, 18-29, 18-28, 18-27, 18-26, 18-25, 18-24, 18-23, 18-22, 18-21, 18-20, 19-30, 19-29, 19-28, 19-27, 19-26, 19-25, 19-24, 19-23, 19-22, 19-21, 19-20, 20-30, 20-29, 20-28, 20-27, 20-26, 20-25, 20-24,20-23, 20-22, 20-21, 21-30, 21-29, 21-28, 21-27, 21-26, 21-25, 21-24, 21-23, or 21-22 base pairs, for example, 19-21 base pairs. Thus, in one embodiment, to the extent that it becomes processed to a functional duplex, of e.g., 15-30 base pairs, that targets a desired RNA for cleavage, an RNA molecule or complex of RNA molecules having a duplex region greater than 30 base pairs is a dsRNA. Thus, an ordinarily skilled artisan will recognize that in one embodiment, a miRNA is a dsRNA. In another embodiment, a dsRNA is not a naturally occurring miRNA. In another embodiment, an RNAi agent useful to target MAPT expression is not generated in the target cell by cleavage of a larger dsRNA.

[0263] A dsRNA as described herein can further include one or more single-stranded nucleotide overhangs e.g., 1, 2, 3, or 4 nucleotides. A nucleotide overhang can comprise or consist of a nucleotide/nucleoside analog, including a deoxynucleotide/nucleoside. The overhang(s) can be on the sense strand, the antisense strand or any combination thereof. Furthermore, the nucleotide(s) of an overhang can be present on the 5′-end, 3′-end or both ends of either an antisense or sense strand of a dsRNA.

[0264] A dsRNA can be synthesized by standard methods known in the art. Double stranded RNAi compounds of the invention may be prepared using a two-step procedure. First, the individual strands of the double stranded RNA molecule are prepared separately. Then, the component strands are annealed. The individual strands of the siRNA compound can be prepared using solution-phase or solid-phase organic synthesis or both. Organic synthesis offers the advantage that the oligonucleotide strands comprising unnatural or modified nucleotides can be easily prepared. Similarly, single-stranded oligonucleotides of the invention can be prepared using solution-phase or solid-phase organic synthesis or both.

In one aspect, a dsRNA of the disclosure includes at least two nucleotide sequences, a sense sequence and an antisense sequence. The sense strand sequence for MAPT may be selected from the group of sequences provided in any one of Tables 3-8, 12-13, and 16-28, and the corresponding nucleotide sequence of the antisense strand of the sense strand may be selected from the group of sequences of any one of Tables 3-8, 12-13, and 16-28. In this aspect, one of the two sequences is complementary to the other of the two sequences, with one of the sequences being substantially complementary to a sequence of an mRNA generated in the expression of a MAPT gene. As such, in this aspect, a dsRNA will include two oligonucleotides, where one oligonucleotide is described as the sense strand (passenger strand) in any one of Tables 3-8, 12-13, and 16-28, and the second oligonucleotide is described as the corresponding antisense strand (guide strand) of the sense strand in any one of Tables 3-8, 12-13, and 16-28.

[0265] In one embodiment, the sense strand comprises at least 15 contiguous nucleotides differing by no more than three nucleotides from any one of the nucleotide sequence of nucleotides 512-532, 513-533, 514-534, 515-535, 516-536, 517-537, 518-538, 519-539, 520-540, 1063-1083, 1067-1087, 1072-1092, 1074-1094, 1075-1095, 1125-1145, 1126-1146, 1127-1147, 1129-1149, 1170-1190, 1395-1415, 1905-1925, 1906-1926, 1909-1929, 1911-1931, 1912-1932, 1913-1933, 1914-1934, 1915-1935, 1916-1936, 1919-1939, 1951-1971, 1954-1974, 1958-1978, 2387-2407, 2409-2429, 2410-2430, 2469-2489, 2471-2491, 2472-2492, 2476-2496, 2477-2497, 2478-2498, 2480-2500, 2481-2501, 2482-2502, 2484-2504, 2762-2782, 2764-2784, 2766-2786, 2767-2787, 2768-2788, 2769-2789, 2819-2839, 2821-2841, 2828-2848, 2943-2963, 2944-2964, 2946-2966, 2947-2967, 3252-3272, 3277-3297, 3280-3300, 3281-3301, 3282-3302, 3284-3304, 3285-3305, 3286-3306, 3331-3351, 3332-3352, 3333-3353, 3334-3354, 3335-3355, 3336-3356, 3338-3358, 3340-3360, 3342-3362, 3343-3363, 3344-3364, 3345-3365, 3346-3366, 3347-3367, 3349-3369, 3350-3370, 3353-3373, 3364-3384, 3366-3386, 3367-3387, 3368-3388, 3369-3389, 3370-3390, 3412-3432, 3414-3434, 3415-3435, 3416-3436, 3417-3437, 3419-3439, 3420-3440, 3424-3444, 3425-3445, 3426-3446, 3427-3447, 3428-3448, 3429-3449, 3430-3450, 3431-3451, 3434-3454, 4132-4152, 4134-4154, 4179-4199, 4182-4202, 4184-4204, 4395-4415, 4425-4445, 4426-4446, 4429-4449, 4469-4489, 4470-4490, 4471-4491, 4472-4492, 4473-4493, 4474-4494, 4569-4589, 4571-4591, 4572-4592, 4596-4616, 4623-4643, 4721-4741, 4722-4742, 4725-4745, 4726-4746, 4766-4786, 4767-4787, 4768-4788, 4769-4789, 4770-4790, 4779-4799, 4805-4825, 4806-4826, 4807-4827, 4808-4828, 4809-4829, 4812-4832, 4813-4833, 4814-4834, 4936-4956, 5072-5092, 5073-5093, 5345-5365, 5346-5366, 5349-5369, 5350-5370, 5351-5371, 5460-5480, 5461-5481, 5463-5483, 5465-5485, 5467-5487, 5468-5488, 5469-5489, 5470-5490, 5471-5491, 5505-5525, 5506-5526, 5507-5527, 5508-5528, 5509-5529, 5511-5531, 5513-5533, 5514-5534, 5541-5561, 5544-5564, 5546-5566, 5547-5567, 5548-5568, 5550-5570, 5551-5571, 5574-5594, 5576-5596, 5614-5634, 521-541, 522-542, 523-543, 524-544, 525-545, 526-546, 527-547, 528-548, 529-549, 530-550, 531-551, 532-552, 533-553, 534-554, 535-555, 536-556, 1034-1054,1035-1055, 1036-1056, 1037-1057, 1038-1058, 1039-1059, 1040-1060, 1041-1061, 1042-1062, 1043-1063, 1044-1064, 1045-1065, 1046-1066, 1047-1067, 1048-1068, 1049-1069, 1050-1070, 1051-1071, 1052-1072, 1053-1073, 1054-1074, 1062-1082, 1064-1084, 1065-1085, 1066-1086, 1068-1088, 1069-1089, 1070-1090, 1071-1091, 1073-1093, 1076-1096, 1077-1097, 1078-1098, 1079-1099, 1080-1100, 1081-1101, 1082-1102, 1128-1148, 1129-1149, 1130-1150, 1131-1151, 1132-1152, 1133-1153, 1134-1154, 1135-1155, 1136-1156, 1137-1157, 1138-1158, 1139-1159, 1140-1160, 1141-1161, 1142-1162, 1143-1163, 1144-1164, 1145-1165, 1146-1166, 1147-1167, 1148-1168, 975-995, 976-996, 977-997, 978-998, 979-999, 980-1000, 981-1001, 982-1002, 983-1003, 984-1004, 985-1005, 986-1006, 987-1007, 988-1008, 989-1009, 990-1010, 991-1011, 992-1012, 993-1013, 994-1014, 995-1015, 996-1016, 997-1017, 998-1018, 999-1019, 1000-1020, 1001-1021, 1002-1022, 1003-1023, 1004-1024, 1005-1025, 1006-1026, 1007-1027, 1008-1028, 1009-1029, 1010-1030, 1011-1031,1012-1032, 1013-1033,1014-1034, 1015-1035,1016-1036, 1017-1037,1018-1038, 1019-1039, 1020-1040, 1021-1041, 1022-1042, 1023-1043, 1024-1044, 1025-1045, 1026-1046, 1027-1047, 1028-1048, 1029-1049, 1030-1050, 1031-1051, 1032-1052, 1033-1053, 1034-1054, 1035-1055, 1036-1056, 1037-1057, 1038-1058, 1039-1059, 1040-1060, 1041-1061, 1042-1062, 1043-1063 and 1045-1065 of SEQ ID NO: 3, and the antisense strand comprises at least 15 contiguous nucleotides from the corresponding nucleotide sequence of SEQ ID NO: 4.

[0266] In certain embodiments, the antisense polynucleotides disclosed herein are substantially complementary to a fragment of a target MAPT sequence and comprise a contiguous nucleotide sequence which is at least 80% complementary over its entire length to a fragment of SEQ ID NO: 4 selected from the group of nucleotides, wherein the sense strand comprises at least 15 contiguous nucleotides differing by no more than three nucleotides from any one of the nucleotide sequence of nucleotides 520-541, 520-556, 510-534, 512-536, 516-541, 516-540, 520-544, 524-547, 526-551, 529-556, 532-556, 1065-1089, 1068-1095, 1068-1094, 1075-1100, 1076-1100, 1079-1103, 1123-1147, 1127-1151, 1130-1155, 1903-1934, 1903-1930, 1914-1940, 1949-1975, 2470-2497, 2941-2965, 3275-3302, 3278-3302, 3329-3353, 3333-3357, 3338-3367, 3338-3366, 3348-3390, 3348-3388, 3351-3385, 5507-5562 and 5549-5597 of SEQ ID NO: 3, and the antisense strand comprises at least 15 contiguous nucleotides from the corresponding nucleotide sequence of SEQ ID NO: 4. In some embodiments, the antisense polynucleotides disclosed herein are substantially complementary to a fragment of a target MAPT sequence and comprise a contiguous nucleotide sequence complementary over its entire length to a fragment of SEQ ID NO: 4 selected from the group of nucleotides, wherein the sense strand comprises at least 15 contiguous nucleotides differing by no more than three nucleotides from any one of the nucleotide sequence of nucleotides 520-541, 520-556, 510-534, 512-536, 516-541, 516-540, 520-544, 524-547, 526-551, 529-556, 532-556, 1065-1089, 1068-1095, 1068-1094, 1075-1100, 1076-1100, 1079-1103, 1123-1147, 1127-1151, 1130-1155, 1903-1934, 1903-1930, 1914-1940, 1949-1975, 2470-2497, 2941-2965, 3275-3302, 3278-3302, 3329-3353, 3333-3357, 3338-3367, 3338-3366, 3348-3390, 3348-3388, 3351-3385, 5507-5562 and 5549-5597 of SEQ ID NO: 3, and the antisense strand comprises at least 15 contiguous nucleotides from the corresponding nucleotide sequence of SEQ ID NO: 4.

[0267] In one embodiment, the sense strand comprises at least 15 contiguous nucleotides differing by no more than three nucleotides from any one of the nucleotide sequence of nucleotides 977-997, 980-1000, 973-993, 988-1008, 987-1007, 972-992, 979-999, 1001-1021, 976-996, 994-1014, 1002-1022, 978-998, 974-994, 520-540, 521-541, 5464-5484, 1813-1833, 2378-2398, 3242-3262, 5442-5462, 1665-1685, 524-544, 5207-5227, 4670-4690, 3420-3440, 3328-3348, 5409-5429, 5439-5459, 4527-4547, 5441-5461, 5410-5430 and 5446-5466 of SEQ ID NO: 1, and the antisense strand comprises at least 15 contiguous nucleotides from the corresponding nucleotide sequence of SEQ ID NO: 2.

[0268] In one embodiment, the antisense strand comprises at least 15 contiguous nucleotides differing by no more than three nucleotides from any one of the antisense strand nucleotide sequences of a duplex selected from the group consisting of AD-523799.1, AD-523802.1, AD-523795.1, AD-523810.1, AD-523809.1, AD-1019331.1, AD-523801.1, AD-523823.1, AD-523798.1, AD-523816.1, AD-523824.1, AD-523800.1, AD-523796.1, AD-535094.1, AD-535094.1, AD-535095.1, AD-538647.1, AD-535922.1, AD-536317.1, AD-536911.1, AD-538626.1, AD-535864.1, AD-523561.1, AD-523565.1, AD-523562.1, AD-526914.1, AD-526394.1, AD-395452.1, AD-525343.1, AD-524274.1, AD-526956.1, AD-526986.1, AD-526296.1, AD-526988.1, AD-526957.1, AD-526993.1, AD-1397070.1, AD-1397070.2, AD-1397071.1, AD-1397071.2, AD-1397072.1, AD-1397072.2, AD-1397073.1, AD-1397073.2, AD-1397074.1, AD-1397074.2, AD-1397075.1, AD-1397075.2, AD-1397076.1, AD-1397076.2, AD-1397077.1, AD-1397077.2, AD-1397078.1, AD-1397078.2, AD-1397250.1, AD-1397251.1, AD-1397252.1, AD-1397253.1, AD-1397254.1, AD-1397255.1, AD-1397256.1, AD-1397257.1, AD-1397258.1, AD-1397259.1, AD-1397260.1, AD-1397261.1, AD-1397262.1, AD-1397263.1, AD-1397264.1, AD-1397265.1, AD-1423242.1, AD-1423243.1, AD-1423244.1, AD-1423245.1, AD-1423246.1, AD-1423247.1, AD-1423248.1, AD-1423249.1, AD-1423250.1, AD-1423251.1, AD-1423252.1, AD-1423253.1, AD-1423254.1, AD-1423255.1, AD-1423256.1, AD-1423257.1, AD-1423258.1, AD-1423259.1, AD-1423260.1, AD-1423261.1, AD-1423262.1, AD-1423263.1, AD-1423264.1, AD-1423265.1, AD-1423266.1, AD-1423267.1, AD-1423268.1, AD-1423269.1, AD-1423270.1, AD-1423271.1, AD-1423272.1, AD-1423273.1, AD-1423274.1, AD-1423275.1, AD-1423276.1, AD-1423277.1, AD-1423278.1, AD-1423279.1, AD-1423280.1, AD-1423281.1, AD-1423282.1, AD-1423283.1, AD-1423284.1, AD-1423285.1, AD-1423286.1, AD-1423287.1, AD-1423288.1, AD-1423289.1, AD-1423290.1, AD-1423291.1, AD-1423292.1, AD-1423293.1, AD-1423294.1, AD-1423295.1, AD-1423296.1, AD-1423297.1, AD-1423298.1, AD-1423299.1, AD-1423300.1, AD-1397266.1, AD-1397266.2, AD-1397267.1, AD-1423301.1, AD-1397268.1, AD-1397268.2, AD-1397269.1, AD-1423302.1, AD-1397270.1, AD-1397270.2, AD-1397271.1, AD-1397271.2, AD-1397272.1, AD-1423303.1, AD-1397273.1, AD-1423304.1, AD-1397274.1, AD-1423305.1, AD-1397275.1, AD-1423306.1, AD-1397276.1, AD-1397277.1, AD-1397277.2, AD-1397278.1, AD-1397279.1, AD-1397280.1, AD-1397281.1, AD-1397282.1, AD-1397283.1, AD-1397284.1, AD-1397285.1, AD-1397286.1, AD-1397287.1, AD-1397079.1, AD-1397079.2, AD-1397288.1, AD-1397289.1, AD-1397290.1, AD-1397080.1, AD-1397080.2, AD-1397291.1, AD-1397292.1, AD-1397293.1, AD-1397294.1, AD-1397081.1, AD-1397081.2, AD-1397295.1, AD-1397082.1, AD-1397082.2, AD-1397083.1, AD-1397083.2, AD-1397296.1, AD-1397297.1, AD-1397298.1, AD-1397299.1, AD-1397300.1, AD-1397301.1, AD-1397302.1, AD-1397084.1, AD-1397085.1, AD-1397086.1, AD-1397303.1, AD-1397087.1, AD-1397087.2, AD-1397304.1, AD-1397305.1, AD-1397306.1, AD-1397307.1, AD-1397308.1, AD-1397309.1, AD-1397310.1, AD-1397311.1, AD-1397312.1, AD-1397313.1, AD-1397314.1, AD-1397315.1, AD-1397316.1, AD-1397317.1, AD-1397318.1, AD-1397319.1, AD-1397320.1, AD-1397321.1, AD-1397322.1, AD-1397088.1, AD-1397089.1, AD-1397090.1, AD-1397091.1, AD-1397092.1, AD-1397093.1, AD-1397094.1, AD-1397095.1, AD-1397096.1, AD-1397097.1, AD-1397098.1, AD-1397099.1, AD-1397101.1, AD-1397102.1, AD-1397103.1, AD-1397104.1, AD-1397105.1, AD-1397106.1, AD-1397107.1, AD-1397108.1, AD-1397109.1, AD-1397110.1, AD-1397111.1, AD-1397112.1, AD-1397113.1, AD-1397114.1, AD-1397115.1, AD-1397116.1, AD-1397117.1, AD-1397118.1, AD-1397119.1, AD-1397120.1, AD-1397121.1, AD-1397122.1, AD-1397123.1, AD-1397124.1, AD-1397125.1, AD-1397126.1, AD-1397127.1, AD-1397128.1, AD-1397129.1, AD-1397130.1, AD-1397131.1, AD-1397132.1, AD-1397133.1, AD-1397134.1, AD-1397135.1, AD-1397136.1, AD-1397137.1, AD-1397138.1, AD-1397139.1, AD-1397140.1, AD-1397141.1, AD-1397142.1, AD-1397143.1, AD-1397144.1, AD-1397145.1, AD-1397146.1, AD-1397147.1, AD-1397148.1, AD-1397149.1, AD-1397150.1, AD-1397151.1, AD-1397152.1, AD-1397153.1, AD-1397154.1, AD-1397155.1, AD-1397156.1, AD-1397157.1, AD-1397158.1, AD-1397159.1, AD-1397160.1, AD-1397161.1, AD-1397162.1, AD-1397163.1, AD-1397164.1, AD-1397165.1, AD-1397166.1, AD-1397167.1, AD-1397168.1, AD-1397169.1, AD-1397170.1, AD-1397171.1, AD-1397172.1, AD-1397173.1, AD-1397174.1, AD-1397175.1, AD-1397176.1, AD-1397177.1, AD-1397178.1, AD-1397179.1, AD-1397180.1, AD-1397181.1, AD-1397182.1, AD-1397183.1, AD-1397184.1, AD-1397185.1, AD-1397186.1, AD-1397187.1, AD-1397188.1, AD-1397189.1, AD-1397190.1, AD-1397191.1, AD-1397192.1, AD-1397193.1, AD-1397194.1, AD-1397195.1, AD-1397196.1, AD-1397197.1, AD-1397198.1, AD-1397199.1, AD-1397200.1, AD-1397201.1, AD-1397202.1, AD-1397203.1, AD-1397204.1, AD-1397205.1, AD-1397206.1, AD-1397207.1, AD-1397208.1, AD-1397209.1, AD-1397210.1, AD-1397211.1, AD-1397212.1, AD-1397213.1, AD-1397214.1, AD-1397215.1, AD-1397216.1, AD-1397217.1, AD-1397218.1, AD-1397219.1, AD-1397220.1, AD-1397221.1, AD-1397222.1, AD-1397223.1, AD-1397224.1, AD-1397225.1, AD-1397226.1, AD-1397227.1, AD-1397228.1, AD-1397229.1, AD-1397230.1, AD-1397231.1, AD-1397232.1, AD-1397233.1, AD-1397234.1, AD-1397235.1, AD-1397236.1, AD-1397237.1, AD-1397238.1, AD-1397239.1, AD-1397240.1, AD-1397241.1, AD-1397242.1, AD-1397243.1, AD-1397244.1, AD-1397245.1, AD-1397246.1, AD-1397247.1, AD-1397248.1, AD-1397249.1, AD-523565.1, AD-1397072.3, AD-1397073.3, AD-1397076.3, AD-1397077.3, AD-1397078.3, AD-1397252.2, AD-1397257.2, AD-1397258.2, AD-1397259.2, AD-1397263.2, AD-1397264.2, AD-1397309.2, AD-64958.114, AD-393758.4, AD-1397080.3, AD-1397293.2, AD-1397294.2, AD-1397081.3, AD-1397083.3, AD-1397298.2, AD-1397299.2, AD-1397084.2, AD-1397085.2, AD-1397087.3, AD-1397306.2, AD-1397307.2, AD-1397308.2, AD-1397088.2, AD-1566238, AD-1566239, AD-1566240, AD-1566241, AD-1566242, AD-1566243, AD-1566244, AD-1566245, AD-1566246, AD-1091965, AD-1566248, AD-1566249, AD-1566250, AD-1091966, AD-1566251, AD-1566252, AD-1566253, AD-1566254, AD-1566255, AD-1566256, AD-1566257, AD-1566258, AD-1566259, AD-692906, AD-1566575, AD-1566576, AD-1566577, AD-1566580, AD-1566581, AD-1566582, AD-1566583, AD-1566584, AD-1566586, AD-1566587, AD-1566588, AD-1566590, AD-1566591, AD-1566634, AD-1566635, AD-1566638, AD-1566639, AD-1566641, AD-1566642, AD-1566643, AD-1566679, AD-1566861, AD-1567153, AD-1567154, AD-1567157, AD-1567159, AD-1567160, AD-1567161, AD-1567164, AD-1567167, AD-1567199, AD-1567202, AD-1567550, AD-1567554, AD-1567784, AD-1567896, AD-1567897, AD-1568105, AD-1568108, AD-1568109, AD-1568139, AD-1568140, AD-1568143, AD-1568144, AD-1568148, AD-1568150, AD-1568151, AD-1568152, AD-1568153, AD-1568154, AD-1568158, AD-1568161, AD-1568172, AD-1568174, AD-1568175, AD-692908, AD-1568176, AD-1569830, AD-1569832, AD-1569834, AD-1569835, AD-1569862, AD-1569872, AD-1569890 and AD-1569892.

[0269] In a particular embodiment, the antisense strand comprises at least 15 contiguous nucleotides differing by no more than three nucleotides from any one of the antisense strand nucleotide sequences of a duplex selected from the group consisting of AD-523799.1, AD-523802.1, AD-523795.1, AD-523810.1, AD-523809.1, AD-1019331.1, AD-523801.1, AD-523823.1, AD-523798.1, AD-523816.1, AD-523824.1, AD-523800.1, AD-523796.1, AD-535094.1, AD-535094.1, AD-535095.1, AD-538647.1, AD-535922.1, AD-536317.1, AD-536911.1, AD-538626.1, AD-535864.1, AD-523561.1, AD-523565.1, AD-523562.1, AD-526914.1, AD-526394.1, AD-395452.1, AD-525343.1, AD-524274.1, AD-526956.1, AD-526986.1, AD-526296.1, AD-526988.1, AD-526957.1 and AD-526993.1. In one embodiment, the antisense strand comprises at least 15 contiguous nucleotides differing by no more than three nucleotides from any one of the antisense strand nucleotide sequences of a duplex selected from the group consisting of AD-523799.1, AD-523802.1, AD-523795.1, AD-523810.1, AD-523809.1, AD-1019331.1, AD-523801.1, AD-523823.1, AD-523798.1, AD-523816.1, AD-523824.1, AD-523800.1 and AD-523796.1.

[0270] In some embodiments, the present invention provides a dsRNA agent for inhibiting expression of MAPT, wherein the dsRNA agent comprises a sense strand and an antisense strand forming a double stranded region, wherein the antisense strand comprises a region of complementarity to an mRNA encoding Tau, and wherein the region of complementarity comprises at least 15 contiguous nucleotides differing by no more than 3 nucleotides from any one of the antisense nucleotide sequences in any one of Tables 12-13.

[0271] In one embodiment, the sense strand comprises at least 15 contiguous nucleotides differing by no more than three nucleotides from any one of the nucleotide sequence of nucleotides 1065-1085, 1195-1215, 1066-1086, 1068-1088, 705-725, 1067-1087, 4520-4540, 3341-3361, 4515-4535, 5284-5304, 5285-5305, 344-364, 5283-5303, 5354-5374, 2459-2479, 1061-1081, 706-726, 972-992, 4564-4584, 995-1015, 4546-4566, 968-988, 1127-1147, 4534-4554, 158-178, 4494-4514, 1691-1711, 3544-3564, 198-218, 979-999, 4548-4568, 4551-4571, 543-563, 715-735, 542-562, 352-372, 362-382, 4556-4576, 4547-4567, 4542-4562, 4558-4578, 4549-4569, 5074-5094, 4552-4572, 5073-5093, 5076-5096, 4550-4570 and 2753-2773 of SEQ ID NO: 5, and the antisense strand comprises at least 15 contiguous nucleotides from the corresponding nucleotide sequence of SEQ ID NO: 6.

[0272] In one embodiment, the antisense strand comprises at least 15 contiguous nucleotides differing by no more than three nucleotides from any one of the antisense strand nucleotide sequences of a duplex selected from the group consisting of AD-393758.1, AD-393888.1, AD-393759.1, AD-393761.1, AD-393495.1, AD-393760.1, AD-396425.1, AD-395441.1, AD-396420.1, AD-397103.1, AD-397104.1, AD-393239.1, AD-397102.1, AD-397167.1, AD-394791.1, AD-393754.1, AD-393496.1, AD-393667.1, AD-396467.1, AD-393690.1, AD-396449.1, AD-393663.1, AD-393820.1, AD-396437.1, AD-393084.1, AD-396401.1, AD-394296.1, AD-395574.1, AD-393124.1, AD-393674.1, AD-396451.1, AD-396454.1, AD-393376.1, AD-393505.1, AD-393375.1, AD-393247.1, AD-393257.1, AD-396459.1, AD-396450.1, AD-396445.1, AD-396461.1, AD-396452.1, AD-396913.1, AD-396455.1, AD-396912.1, AD-396915.1, AD-396453.1 and AD-394991.1.

[0273] In one embodiment, the nucleotide sequence of the sense strand comprises at least 15 contiguous nucleotides corresponding to the MAPT gene exon 10 sense strand sequence set forth in SEQ ID NO.: 1533 and an antisense strand comprising a sequence complementary thereto.

[0274] In one embodiment, the substantially complementary sequences of the dsRNA are contained on separate oligonucleotides. In another embodiment, the substantially complementary sequences of the dsRNA are contained on a single oligonucleotide.

[0275] It will be understood that, although the sequences in Tables 6-8, 13, 17, 19, 21, 23, 26 and 28, are described as modified or conjugated sequences, the RNA of the RNAi agent of the disclosure e.g., a dsRNA of the disclosure, may comprise any one of the sequences set forth in any one of Tables 3-8, 12-13, and 16-28, that is un-modified, un-conjugated, or modified or conjugated differently than described therein. For example, although the sense strands of the agents of the invention may be conjugated to a GalNAc ligand, these agents may be conjugated to a moiety that directs delivery to the CNS, e.g., a C16 ligand, as described herein. In one embodiment, the lipophilic moiety contains a saturated or unsaturated C16 hydrocarbon chain (e.g., a linear C16 alkyl or alkenyl). A lipophilic ligand can be included in any of the positions provided in the instant application. In some embodiments, the lipophilic moiety is conjugated to a nucleobase, sugar moiety, or internucleosidic linkage of the double-stranded iRNA agent. For example, a C16 ligand may be conjugated via the 2′-oxygen of a ribonucleotide as shown in the following structure:

[chemical structure]

where * denotes a bond to an adjacent nucleotide, and B is a nucleobase or a nucleobase analog, optionally where B is adenine, guanine, cytosine, thymine or uracil. Design and Synthesis of the ligands and monomers provided herein are described, for example, in PCT publication Nos. WO2019/217459, WO2020/132227, and WO2020/257194, contents of which are incorporated herein by reference in their entirety.

[0276] In some embodiments, the double-stranded iRNA agent further comprises a phosphate or phosphate mimic at the 5′-end of the antisense strand. In one embodiment, the phosphate mimic is a 5′-vinyl phosphonate (VP). In some embodiments, the 5′-end of the antisense strand of the double-stranded iRNA agent does not contain a 5′-vinyl phosphonate (VP).

[0277] The skilled person is well aware that dsRNAs having a duplex structure of about 20 to 23 base pairs, e.g., 21, base pairs have been hailed as particularly effective in inducing RNA interference (Elbashir et al., (2001) EMBO J., 20:6877-6888). However, others have found that shorter or longer RNA duplex structures can also be effective (Chu and Rana (2007) RNA 14:1714-1719; Kim et al. (2005) Nat Biotech 23:222-226). In the embodiments described above, by virtue of the nature of the oligonucleotide sequences provided herein, dsRNAs described herein can include at least one strand of a length of minimally 21 nucleotides. It can be reasonably expected that shorter duplexes minus only a few nucleotides on one or both ends can be similarly effective as compared to the dsRNAs described above. Hence, dsRNAs having a sequence of at least 15, 16, 17, 18, 19, 20, or more contiguous nucleotides derived from one of the sequences provided herein, and differing in their ability to inhibit the expression of a MAPT gene by at least about 25%, at least about 30%, at least about 40%, at least about 50%, at least about 60%, at least about 70%, at least about 80%, at least about 90%, or at least about 95% inhibition relative to a control level, from a dsRNA comprising the full sequence using the in vitro assay with, e.g., A549 cells and a 10 nM concentration of the RNA agent and the PCR assay as provided in the examples herein, are contemplated to be within the scope of the present disclosure. In some embodiments, inhibition from a dsRNA comprising the full sequence was measured using the in vitro assay with primary mouse hepatocytes.

[0278] In addition, the RNAs described herein identify a site(s) in a MAPT transcript that is susceptible to RISC-mediated cleavage. As such, the present disclosure further features RNAi agents that target within this site(s). As used herein, an RNAi agent is said to target within a particular site of an RNA transcript if the RNAi agent promotes cleavage of the transcript anywhere within that particular site. Such an RNAi agent will generally include at least about 15 contiguous nucleotides, preferably at least 19 nucleotides, from one of the sequences provided herein coupled to additional nucleotide sequences taken from the region contiguous to the selected sequence in a MAPT gene.

### III. Modified RNAi Agents of the Disclosure

[0279] In one embodiment, the RNA of the RNAi agent of the disclosure e.g., a dsRNA, is un-modified, and does not comprise, e.g., chemical modifications or conjugations known in the art and described herein. In preferred embodiments, the RNA of an RNAi agent of the disclosure, e.g., a dsRNA, is chemically modified to enhance stability or other beneficial characteristics. In certain embodiments of the disclosure, substantially all of the nucleotides of an RNAi agent of the disclosure are modified. In other embodiments of the disclosure, all of the nucleotides of an RNAi agent of the disclosure are modified. RNAi agents of the disclosure in which “substantially all of the nucleotides are modified” are largely but not wholly modified and can include not more than 5, 4, 3, 2, or unmodified nucleotides. In still other embodiments of the disclosure, RNAi agents of the disclosure can include not more than 5, 4, 3, 2 or 1 modified nucleotides.

[0280] The nucleic acids featured in the disclosure can be synthesized or modified by methods well established in the art, such as those described in “Current protocols in nucleic acid chemistry,” Beaucage, S. L. et al. (Edrs.), John Wiley & Sons, Inc., New York, N.Y., USA, which is hereby incorporated herein by reference. Modifications include, for example, end modifications, e.g., 5′-end modifications (phosphorylation, conjugation, inverted linkages) or 3′-end modifications (conjugation, DNA nucleotides, inverted linkages, etc.); base modifications, e.g., replacement with stabilizing bases, destabilizing bases, or bases that base pair with an expanded repertoire of partners, removal of bases (abasic nucleotides), or conjugated bases; sugar modifications (e.g., at the 2′-position or 4′-position) or replacement of the sugar; or backbone modifications, including modification or replacement of the phosphodiester linkages. Specific examples of RNAi agents useful in the embodiments described herein include, but are not limited to, RNAs containing modified backbones or no natural internucleoside linkages. RNAs having modified backbones include, among others, those that do not have a phosphorus atom in the backbone. For the purposes of this specification, and as sometimes referenced in the art, modified RNAs that do not have a phosphorus atom in their internucleoside backbone can also be considered to be oligonucleosides. In some embodiments, a modified RNAi agent will have a phosphorus atom in its internucleoside backbone.

[0281] Modified RNA backbones include, for example, phosphorothioates, chiral phosphorothioates, phosphorodithioates, phosphotriesters, aminoalkylphosphotriesters, methyl and other alkyl phosphonates including 3′-alkylene phosphonates and chiral phosphonates, phosphinates, phosphoramidates including 3′-amino phosphoramidate and aminoalkylphosphoramidates, thionophosphoramidates, thionoalkylphosphonates, thionoalkylphosphotriesters, and boranophosphates having normal 3′-5′ linkages, 2′-5′-linked analogs of these, and those having inverted polarity wherein the adjacent pairs of nucleoside units are linked 3′-5′ to 5′-3′ or 2′-5′ to 5′-2′.

[0282] Various salts, mixed salts and free acid forms are also included. In some embodiments of the invention, the dsRNA agents of the invention are in a free acid form. In other embodiments of the invention, the dsRNA agents of the invention are in a salt form. In one embodiment, the dsRNA agents of the invention are in a sodium salt form. In certain embodiments, when the dsRNA agents of the invention are in the sodium salt form, sodium ions are present in the agent as counterions for substantially all of the phosphodiester and/or phosphorothiotate groups present in the agent. Agents in which substantially all of the phosphodiester and/or phosphorothioate linkages have a sodium counterion include not more than 5, 4, 3, 2, or 1 phosphodiester and/or phosphorothioate linkages without a sodium counterion. In some embodiments, when the dsRNA agents of the invention are in the sodium salt form, sodium ions are present in the agent as counterions for all of the phosphodiester and/or phosphorothiotate groups present in the agent.

[0283] Representative U.S. patents that teach the preparation of the above phosphorus-containing linkages include, but are not limited to, U.S. Pat. Nos. 3,687,808; 4,469,863; 4,476,301; 5,023,243; 5,177,195; 5,188,897; 5,264,423; 5,276,019; 5,278,302; 5,286,717; 5,321,131; 5,399,676; 5,405,939; 5,453,496; 5,455,233; 5,466,677; 5,476,925; 5,519,126; 5,536,821; 5,541,316; 5,550,111; 5,563,253; 5,571,799; 5,587,361; 5,625,050; 6,028,188; 6,124,445; 6,160,109; 6,169,170; 6,172,209; 6,239,265; 6,277,603; 6,326,199; 6,346,614; 6,444,423; 6,531,590; 6,534,639; 6,608,035; 6,683,167; 6,858,715; 6,867,294; 6,878,805; 7,015,315; 7,041,816; 7,273,933; 7,321,029; and U.S. Pat. RE39464, the entire contents of each of which are hereby incorporated herein by reference.

[0284] Modified RNA backbones that do not include a phosphorus atom therein have backbones that are formed by short chain alkyl or cycloalkyl internucleoside linkages, mixed heteroatoms and alkyl or cycloalkyl internucleoside linkages, or one or more short chain heteroatomic or heterocyclic internucleoside linkages. These include those having morpholino linkages (formed in part from the sugar portion of a nucleoside); siloxane backbones; sulfide, sulfoxide and sulfone backbones; formacetyl and thioformacetyl backbones; methylene formacetyl and thioformacetyl backbones; alkene containing backbones; sulfamate backbones; methyleneimino and methylenehydrazino backbones; sulfonate and sulfonamide backbones; amide backbones; and others having mixed N, O, S and CH₂ component parts.

[0285] Representative U.S. patents that teach the preparation of the above oligonucleosides include, but are not limited to, U.S. Pat. Nos. 5,034,506; 5,166,315; 5,185,444; 5,214,134; 5,216,141; 5,235,033; 5,64,562; 5,264,564; 5,405,938; 5,434,257; 5,466,677; 5,470,967; 5,489,677; 5,541,307; 5,561,225; 5,596,086; 5,602,240; 5,608,046; 5,610,289; 5,618,704; 5,623,070; 5,663,312; 5,633,360; 5,677,437; and, 5,677,439, the entire contents of each of which are hereby incorporated herein by reference.

[0286] In other embodiments, suitable RNA mimetics are contemplated for use in RNAi agents, in which both the sugar and the internucleoside linkage, i.e., the backbone, of the nucleotide units are replaced with alternate groups. The base units are maintained for hybridization with an appropriate nucleic acid target compound. One such oligomeric compound, a RNA mimetic that has been shown to have excellent hybridization properties, is referred to as a peptide nucleic acid (PNA). In PNA compounds, the sugar backbone of an RNA is replaced with an amide containing backbone, in particular an aminoethylglycine backbone. The nucleobases are retained and are bound directly or indirectly to aza nitrogen atoms of the amide portion of the backbone. Representative U.S. patents that teach the preparation of PNA compounds include, but are not limited to, U.S. Pat. Nos. 5,539,082; 5,714,331; and 5,719,262, the entire contents of each of which are hereby incorporated herein by reference. Additional PNA compounds suitable for use in the RNAi agents of the disclosure are described in, for example, in Nielsen et al., Science, 1991, 254, 1497-1500.

[0287] Some embodiments featured in the disclosure include RNAs with phosphorothioate backbones and oligonucleosides with heteroatom backbones, and in particular —CH₂—NH—CH₂—, —CH₂—N(CH₃)—O—CH₂-[known as a methylene (methylimino) or MMI backbone], —CH₂—O—N(CH₃)—CH₂—, —CH₂—N(CH₃)—N(CH₃)—CH₂— and —N(CH₃)—CH₂-[wherein the native phosphodiester backbone is represented as —O—P—O—CH₂—] of the above-referenced U.S. Pat. No. 5,489,677, and the amide backbones of the above-referenced U.S. Pat. No. 5,602,240. In some embodiments, the RNAs featured herein have morpholino backbone structures of the above-referenced U.S. Pat. No. 5,034,506.

[0288] Modified RNAs can also contain one or more substituted sugar moieties. The RNAi agents, e.g., dsRNAs, featured herein can include one of the following at the 2′-position: OH; F; O-, S-, or N-alkyl; O-, S-, or N-alkenyl; O-, S- or N-alkynyl; or O-alkyl-O-alkyl, wherein the alkyl, alkenyl and alkynyl can be substituted or unsubstituted C₁ to C₁₀ alkyl or C₂ to C₁₀ alkenyl and alkynyl. Exemplary suitable modifications include O[(CH₂)ₙO]ₘCH₃, O(CH₂)_{·n}OCH₃, O(CH₂)ₙNH₂, O(CH₂)ₙCH₃, O(CH₂)ₙONH₂, and O(CH₂)ₙON[(CH₂)ₙCH₃)]₂, where n and m are from 1 to about 10. In other embodiments, dsRNAs include one of the following at the 2′ position: C₁ to C₁₀ lower alkyl, substituted lower alkyl, alkaryl, aralkyl, O-alkaryl or O-aralkyl, SH, SCH₃, OCN, Cl, Br, CN, CF₃, OCF₃, SOCH₃, SO₂CH₃, ONO₂, NO₂, N₃, NH₂, heterocycloalkyl, heterocycloalkaryl, aminoalkylamino, polyalkylamino, substituted silyl, an RNA cleaving group, a reporter group, an intercalator, a group for improving the pharmacokinetic properties of an RNAi agent, or a group for improving the pharmacodynamic properties of an RNAi agent, and other substituents having similar properties. In some embodiments, the modification includes a 2′-methoxyethoxy (2′-O—CH₂CH₂OCH₃, also known as 2′-O-(2-methoxyethyl) or 2′-MOE) (Martin et al., Helv. Chim. Acta, 1995, 78:486-504) i.e., an alkoxy-alkoxy group. Another exemplary modification is 2′-dimethylaminooxyethoxy, i.e., a O(CH₂)₂ON(CH₃)₂ group, also known as 2′-DMAOE, as described in examples herein below, and 2′-dimethylaminoethoxyethoxy (also known in the art as 2′-O-dimethylaminoethoxyethyl or 2′-DMAEOE), i.e., 2′-O—CH₂—O—CH₂—N(CH₂)₂. Further exemplary modifications include: 5′-Me-2′-F nucleotides, 5′-Me-2′-OMe nucleotides, 5′-Me-2′-deoxynucleotides, (both R and S isomers in these three families); 2′-alkoxyalkyl; and 2′-NMA (N-methylacetamide).

[0289] Other modifications include 2′-methoxy (2′-OCH₃), 2′-aminopropoxy (2′-OCH₂CH₂CH₂NH₂), 2′-O-hexadecyl, and 2′-fluoro (2′-F). Similar modifications can also be made at other positions on the RNA of an RNAi agent, particularly the 3′ position of the sugar on the 3′ terminal nucleotide or in 2′-5′ linked dsRNAs and the 5′ position of 5′ terminal nucleotide. RNAi agents can also have sugar mimetics such as cyclobutyl moieties in place of the pentofuranosyl sugar. Representative U.S. patents that teach the preparation of such modified sugar structures include, but are not limited to, U.S. Pat. Nos. 4,981,957; 5,118,800; 5,319,080; 5,359,044; 5,393,878; 5,446,137; 5,466,786; 5,514,785; 5,519,134; 5,567,811; 5,576,427; 5,591,722; 5,597,909; 5,610,300; 5,627,053; 5,639,873; 5,646,265; 5,658,873; 5,670,633; and 5,700,920, certain of which are commonly owned with the instant application. The entire contents of each of the foregoing are hereby incorporated herein by reference.

[0290] An RNAi agent of the disclosure can also include nucleobase (often referred to in the art simply as “base”) modifications or substitutions. As used herein, “unmodified” or “natural” nucleobases include the purine bases adenine (A) and guanine (G), and the pyrimidine bases thymine (T), cytosine (C) and uracil (U). Modified nucleobases include other synthetic and natural nucleobases such as 5-methylcytosine (5-me-C), 5-hydroxymethyl cytosine, xanthine, hypoxanthine, 2-aminoadenine, 6-methyl and other alkyl derivatives of adenine and guanine, 2-propyl and other alkyl derivatives of adenine and guanine, 2-thiouracil, 2-thiothymine and 2-thiocytosine, 5-halouracil and cytosine, 5-propynyl uracil and cytosine, 6-azo uracil, cytosine and thymine, 5-uracil (pseudouracil), 4-thiouracil, 8-halo, 8-amino, 8-thiol, 8-thioalkyl, 8-hydroxyl anal other 8-substituted adenines and guanines, 5-halo, particularly 5-bromo, 5-trifluoromethyl and other 5-substituted uracils and cytosines, 7-methylguanine and 7-methyladenine, 8-azaguanine and 8-azaadenine, 7-deazaguanine and 7-daazaadenine and 3-deazaguanine and 3-deazaadenine. Further nucleobases include those disclosed in U.S. Pat. No. 3,687,808, those disclosed in Modified Nucleosides in Biochemistry, Biotechnology and Medicine, Herdewijn, P. ed. Wiley-VCH, 2008; those disclosed in The Concise Encyclopedia Of Polymer Science And Engineering, pages 858-859, Kroschwitz, J. L, ed. John Wiley & Sons, 1990, these disclosed by Englisch et al., (1991) Angewandte Chemie, International Edition, 30:613, and those disclosed by Sanghvi, Y S., Chapter 15, dsRNA Research and Applications, pages 289-302, Crooke, S. T. and Lebleu, B., Ed., CRC Press, 1993. Certain of these nucleobases are particularly useful for increasing the binding affinity of the oligomeric compounds featured in the disclosure. These include 5-substituted pyrimidines, 6-azapyrimidines and N-2, N-6 and 0-6 substituted purines, including 2-aminopropyladenine, 5-propynyluracil and 5-propynylcytosine. 5-methylcytosine substitutions have been shown to increase nucleic acid duplex stability by 0.6-1.2° C. (Sanghvi, Y. S., Crooke, S. T. and Lebleu, B., Eds., dsRNA Research and Applications, CRC Press, Boca Raton, 1993, pp. 276-278) and are exemplary base substitutions, even more particularly when combined with 2′-O-methoxyethyl sugar modifications.

[0291] Representative U.S. patents that teach the preparation of certain of the above noted modified nucleobases as well as other modified nucleobases include, but are not limited to, the above noted U.S. Pat. Nos. 3,687,808, 4,845,205; 5,130,30; 5,134,066; 5,175,273; 5,367,066; 5,432,272; 5,457,187; 5,459,255; 5,484,908; 5,502,177; 5,525,711; 5,552,540; 5,587,469; 5,594,121, 5,596,091; 5,614,617; 5,681,941; 5,750,692; 6,015,886; 6,147,200; 6,166,197; 6,222,025; 6,235,887; 6,380,368; 6,528,640; 6,639,062; 6,617,438; 7,045,610; 7,427,672; and 7,495,088, the entire contents of each of which are hereby incorporated herein by reference.

[0292] An RNAi agent of the disclosure can also be modified to include one or more locked nucleic acids (LNA). A locked nucleic acid is a nucleotide having a modified ribose moiety in which the ribose moiety comprises an extra bridge connecting the 2′ and 4′ carbons. This structure effectively “locks” the ribose in the 3′-endo structural conformation. The addition of locked nucleic acids to siRNAs has been shown to increase siRNA stability in serum, and to reduce off-target effects (Elmen, J. et al., (2005) Nucleic Acids Research 33(1):439-447; Mook, O R. et al., (2007) Mol Canc Ther 6(3):833-843; Grunweller, A. et al., (2003) Nucleic Acids Research 31(12):3185-3193).

[0293] An RNAi agent of the disclosure can also be modified to include one or more bicyclic sugar moieties. A “bicyclic sugar” is a furanosyl ring modified by the bridging of two atoms. A “bicyclic nucleoside” (“BNA”) is a nucleoside having a sugar moiety comprising a bridge connecting two carbon atoms of the sugar ring, thereby forming a bicyclic ring system. In certain embodiments, the bridge connects the 4′-carbon and the 2′-carbon of the sugar ring. Thus, in some embodiments an agent of the disclosure may include one or more locked nucleic acids (LNA). A locked nucleic acid is a nucleotide having a modified ribose moiety in which the ribose moiety comprises an extra bridge connecting the 2′ and 4′ carbons. In other words, an LNA is a nucleotide comprising a bicyclic sugar moiety comprising a 4′-CH2-O-2′ bridge. This structure effectively “locks” the ribose in the 3′-endo structural conformation. The addition of locked nucleic acids to siRNAs has been shown to increase siRNA stability in serum, and to reduce off-target effects (Elmen, J. et al., (2005) Nucleic Acids Research 33(1):439-447; Mook, O R. et al., (2007) Mol Canc Ther 6(3):833-843; Grunweller, A. et al., (2003) Nucleic Acids Research 31(12):3185-3193). Examples of bicyclic nucleosides for use in the polynucleotides of the disclosure include without limitation nucleosides comprising a bridge between the 4′ and the 2′ ribosyl ring atoms. In certain embodiments, the antisense polynucleotide agents of the disclosure include one or more bicyclic nucleosides comprising a 4′ to 2′ bridge. Examples of such 4′ to 2′ bridged bicyclic nucleosides, include but are not limited to 4′-(CH2)-O-2′ (LNA); 4′-(CH2)-S-2′; 4′-(CH2)2-O-2′ (ENA); 4′-CH(CH3)-O-2′ (also referred to as “constrained ethyl” or “cEt”) and 4′-CH(CH2OCH3)-O-2′ (and analogs thereof; see, e.g., U.S. Pat. No. 7,399,845); 4′-C(CH3)(CH3)-O-2′ (and analogs thereof; see e.g., U.S. Pat. No. 8,278,283); 4′-CH2-N(OCH3)-2′ (and analogs thereof; see e.g., U.S. Pat. No. 8,278,425); 4′-CH2-O—N(CH3)-2′ (see, e.g., U.S. Patent Publication No. 2004/0171570); 4′-CH2-N(R)—O-2′, wherein R is H, C1-C12 alkyl, or a protecting group (see, e.g., U.S. Pat. No. 7,427,672); 4′-CH2-C(H)(CH3)-2′ (see, e.g., Chattopadhyaya et al., J. Org. Chem., 2009, 74, 118-134); and 4′-CH2-C(═CH2)-2′ (and analogs thereof; see, e.g., U.S. Pat. No. 8,278,426). The entire contents of each of the foregoing are hereby incorporated herein by reference.

[0294] Additional representative US Patents and US Patent Publications that teach the preparation of locked nucleic acid nucleotides include, but are not limited to, the following: U.S. Pat. Nos. 6,268,490; 6,525,191; 6,670,461; 6,770,748; 6,794,499; 6,998,484; 7,053,207; 7,034,133;7,084,125; 7,399,845; 7,427,672; 7,569,686; 7,741,457; 8,022,193; 8,030,467; 8,278,425; 8,278,426; 8,278,283; US 2008/0039618; and US 2009/0012281, the entire contents of each of which are hereby incorporated herein by reference.

[0295] Any of the foregoing bicyclic nucleosides can be prepared having one or more stereochemical sugar configurations including for example α-L-ribofuranose and p-D-ribofuranose (see WO 99/14226).

[0296] An RNAi agent of the disclosure can also be modified to include one or more constrained ethyl nucleotides. As used herein, a “constrained ethyl nucleotide” or “cEt” is a locked nucleic acid comprising a bicyclic sugar moiety comprising a 4′-CH(CH3)-0-2′ bridge. In one embodiment, a constrained ethyl nucleotide is in the S conformation referred to herein as “S-cEt.”

[0297] An RNAi agent of the disclosure may also include one or more “conformationally restricted nucleotides” (“CRN”). CRN are nucleotide analogs with a linker connecting the C2′ and C4′ carbons of ribose or the C3 and —C5′ carbons of ribose. CRN lock the ribose ring into a stable conformation and increase the hybridization affinity to mRNA. The linker is of sufficient length to place the oxygen in an optimal position for stability and affinity resulting in less ribose ring puckering.

[0298] Representative publications that teach the preparation of certain of the above noted CRN include, but are not limited to, US 2013/0190383; and WO 2013/036868, the entire contents of each of which are hereby incorporated herein by reference.

[0299] In some embodiments, an RNAi agent of the disclosure comprises one or more monomers that are UNA (unlocked nucleic acid) nucleotides. UNA is unlocked acyclic nucleic acid, wherein any of the bonds of the sugar has been removed, forming an unlocked “sugar” residue. In one example, UNA also encompasses monomer with bonds between C1′—C4′ have been removed (i.e. the covalent carbon-oxygen-carbon bond between the C1′ and C4′ carbons). In another example, the C2′—C3′ bond (i.e. the covalent carbon-carbon bond between the C2′ and C3′ carbons) of the sugar has been removed (see Nuc. Acids Symp. Series, 52, 133-134 (2008) and Fluiter et al., Mol. Biosyst., 2009, 10, 1039 hereby incorporated by reference).

[0300] Representative U.S. publications that teach the preparation of UNA include, but are not limited to, U.S. Pat. No. 8,314,227; and US Patent Publication Nos. 2013/0096289; 2013/0011922; and 2011/0313020, the entire contents of each of which are hereby incorporated herein by reference.

[0301] An RNAi agent of the disclosure may also include one or more “cyclohexene nucleic acids” or (“CeNA”). CeNA are nucleotide analogs with a replacement of the furanose moiety of DNA by a cyclohexene ring. Incorporation of cylcohexenyl nucleosides in a DNA chain increases the stability of a DNA/RNA hybrid. CeNA is stable against degradation in serum and a CeNA/RNA hybrid is able to activate E. Coli RNase H, resulting in cleavage of the RNA strand. (see Wang et al., Am. Chem. Soc. 2000, 122, 36, 8595-8602, hereby incorporated by reference).

[0302] Potentially stabilizing modifications to the ends of RNA molecules can include N-(acetylaminocaproyl)-4-hydroxyprolinol (Hyp-C6-NHAc), N-(caproyl-4-hydroxyprolinol (Hyp-C6), N-(acetyl-4-hydroxyprolinol (Hyp-NHAc), thymidine-2′-O-deoxythymidine (ether), N-(aminocaproyl)4-hydroxyprolinol (Hyp-C6-amino), 2-docosanoyl-uridine-3″-phosphate, inverted base dT(idT) and others. Disclosure of this modification can be found in WO 2011/005861.

[0303] Other modifications of an RNAi agent of the disclosure include a 5′ phosphate or 5′ phosphate mimic, e.g., a 5′-terminal phosphate or phosphate mimic on the antisense strand of an RNAi agent. Suitable phosphate mimics are disclosed in, for example US 2012/0157511, the entire contents of which are incorporated herein by reference.

[0304] A. Modified Rnai Agents Comprising Motifs of the Disclosure

[0305] In certain aspects of the disclosure, the double-stranded RNAi agents of the disclosure include agents with chemical modifications as disclosed, for example, in WO 2013/075035, the entire contents of which are incorporated herein by reference. As shown herein and in WO 2013/075035, a superior result may be obtained by introducing one or more motifs of three identical modifications on three consecutive nucleotides into a sense strand or antisense strand of an RNAi agent, particularly at or near the cleavage site. In some embodiments, the sense strand and antisense strand of the RNAi agent may otherwise be completely modified. The introduction of these motifs interrupts the modification pattern, if present, of the sense or antisense strand. The RNAi agent may be optionally conjugated with a lipophilic ligand, e.g., a C16 ligand, for instance on the sense strand. The RNAi agent may be optionally modified with a (S)-glycol nucleic acid (GNA) modification, for instance on one or more residues of the antisense strand. The resulting RNAi agents present superior gene silencing activity.

[0306] Accordingly, the disclosure provides double stranded RNAi agents capable of inhibiting the expression of a target gene (i.e., a MAPT gene) in vivo. The RNAi agent comprises a sense strand and an antisense strand. Each strand of the RNAi agent may be 15-30 nucleotides in length. For example, each strand may be 16-30 nucleotides in length, 17-30 nucleotides in length, 25-30 nucleotides in length, 27-30 nucleotides in length, 17-23 nucleotides in length, 17-21 nucleotides in length, 17-19 nucleotides in length, 19-25 nucleotides in length, 19-23 nucleotides in length, 19-21 nucleotides in length, 21-25 nucleotides in length, or 21-23 nucleotides in length. In certain embodiments, each strand is 19-23 nucleotides in length.

[0307] The sense strand and antisense strand typically form a duplex double stranded RNA (“dsRNA”), also referred to herein as an “RNAi agent.” The duplex region of an RNAi agent may be 15-30 nucleotide pairs in length. For example, the duplex region can be 16-30 nucleotide pairs in length, 17-30 nucleotide pairs in length, 27-30 nucleotide pairs in length, 17-23 nucleotide pairs in length, 17-21 nucleotide pairs in length, 17-19 nucleotide pairs in length, 19-25 nucleotide pairs in length, 19-23 nucleotide pairs in length, 19-21 nucleotide pairs in length, 21-25 nucleotide pairs in length, or 21-23 nucleotide pairs in length. In another example, the duplex region is selected from 15, 16, 17, 18, 19, 20, 21, 22, 23, 24, 25, 26, and 27 nucleotides in length. In preferred embodiments, the duplex region is 19-21 nucleotide pairs in length.

[0308] In one embodiment, the RNAi agent may contain one or more overhang regions or capping groups at the 3′-end, 5′-end, or both ends of one or both strands. The overhang can be 1-6 nucleotides in length, for instance 2-6 nucleotides in length, 1-5 nucleotides in length, 2-5 nucleotides in length, 14 nucleotides in length, 2-4 nucleotides in length, 1-3 nucleotides in length, 2-3 nucleotides in length, or 1-2 nucleotides in length. In preferred embodiments, the nucleotide overhang region is 2 nucleotides in length. The overhangs can be the result of one strand being longer than the other, or the result of two strands of the same length being staggered. The overhang can form a mismatch with the target mRNA or it can be complementary to the gene sequences being targeted or can be another sequence. The first and second strands can also be joined, e.g., by additional bases to form a hairpin, or by other non-base linkers.

[0309] In one embodiment, the nucleotides in the overhang region of the RNAi agent can each independently be a modified or unmodified nucleotide including, but no limited to 2′-sugar modified, such as, 2-F, 2′-O-methyl, thymidine (T), and any combinations thereof.

[0310] For example, TT can be an overhang sequence for either end on either strand. The overhang can form a mismatch with the target mRNA or it can be complementary to the gene sequences being targeted or can be another sequence.

[0311] The 5′- or 3′-overhangs at the sense strand, antisense strand or both strands of the RNAi agent may be phosphorylated. In some embodiments, the overhang region(s) contains two nucleotides having a phosphorothioate between the two nucleotides, where the two nucleotides can be the same or different. In one embodiment, the overhang is present at the 3′-end of the sense strand, antisense strand, or both strands. In one embodiment, this 3′-overhang is present in the antisense strand. In one embodiment, this 3′-overhang is present in the sense strand.

[0312] The RNAi agent may contain only a single overhang, which can strengthen the interference activity of the RNAi, without affecting its overall stability. For example, the single-stranded overhang may be located at the 3′-terminal end of the sense strand or, alternatively, at the 3′-terminal end of the antisense strand. The RNAi may also have a blunt end, located at the 5′-end of the antisense strand (or the 3′-end of the sense strand) or vice versa. Generally, the antisense strand of the RNAi has a nucleotide overhang at the 3′-end, and the 5′-end is blunt. While not wishing to be bound by theory, the asymmetric blunt end at the 5′-end of the antisense strand and 3′-end overhang of the antisense strand favor the guide strand loading into RISC process.

[0313] In one embodiment, the RNAi agent is double blunt-ended and 19 nucleotides in length, wherein the sense strand contains at least one motif of three 2′-F modifications on three consecutive nucleotides at positions 7, 8, 9 from the 5′end. The antisense strand contains at least one motif of three 2′-O-methyl modifications on three consecutive nucleotides at positions 11, 12, 13 from the 5′end.

[0314] In another embodiment, the RNAi agent is double blunt-ended and 20 nucleotides in length, wherein the sense strand contains at least one motif of three 2′-F modifications on three consecutive nucleotides at positions 8, 9, 10 from the 5′end. The antisense strand contains at least one motif of three 2′-O-methyl modifications on three consecutive nucleotides at positions 11, 12, 13 from the 5′end.

[0315] In yet another embodiment, the RNAi agent is a double blunt-ended and 21 nucleotides in length, wherein the sense strand contains at least one motif of three 2′-F modifications on three consecutive nucleotides at positions 9, 10, 11 from the 5′end. The antisense strand contains at least one motif of three 2′-O-methyl modifications on three consecutive nucleotides at positions 11, 12, 13 from the 5′end.

[0316] In one embodiment, the RNAi agent comprises a 21 nucleotide sense strand and a 23 nucleotide antisense strand, wherein the sense strand contains at least one motif of three 2′-F modifications on three consecutive nucleotides at positions 9, 10, 11 from the 5′end; the antisense strand contains at least one motif of three 2′-O-methyl modifications on three consecutive nucleotides at positions 11, 12, 13 from the 5′end, wherein one end of the RNAi agent is blunt, while the other end comprises a 2 nucleotide overhang. Preferably, the 2 nucleotide overhang is at the 3′-end of the antisense strand. When the 2 nucleotide overhang is at the 3′-end of the antisense strand, there may be two phosphorothioate internucleotide linkages between the terminal three nucleotides, wherein two of the three nucleotides are the overhang nucleotides, and the third nucleotide is a paired nucleotide next to the overhang nucleotide. In one embodiment, the RNAi agent additionally has two phosphorothioate internucleotide linkages between the terminal three nucleotides at both the 5′-end of the sense strand and at the 5′-end of the antisense strand. In one embodiment, every nucleotide in the sense strand and the antisense strand of the RNAi agent, including the nucleotides that are part of the motifs are modified nucleotides. In one embodiment each residue is independently modified with a 2′-O-methyl or 3′-fluoro, e.g., in an alternating motif. Optionally, the RNAi agent further comprises a ligand (e.g., a lipophilic ligand, optionally a C16 ligand).

[0317] In one embodiment, the RNAi agent comprises a sense and an antisense strand, wherein the sense strand is 25-30 nucleotide residues in length, wherein starting from the 5′ terminal nucleotide (position 1) positions 1 to 23 of the first strand comprise at least 8 ribonucleotides; the antisense strand is 36-66 nucleotide residues in length and, starting from the 3′ terminal nucleotide, comprises at least 8 ribonucleotides in the positions paired with positions 1-23 of sense strand to form a duplex; wherein at least the 3′ terminal nucleotide of antisense strand is unpaired with sense strand, and up to 6 consecutive 3′ terminal nucleotides are unpaired with sense strand, thereby forming a 3′ single stranded overhang of 1-6 nucleotides; wherein the 5′ terminus of antisense strand comprises from 10-consecutive nucleotides which are unpaired with sense strand, thereby forming a 10-30 nucleotide single stranded 5′ overhang; wherein at least the sense strand 5′ terminal and 3′ terminal nucleotides are base paired with nucleotides of antisense strand when sense and antisense strands are aligned for maximum complementarity, thereby forming a substantially duplexed region between sense and antisense strands; and antisense strand is sufficiently complementary to a target RNA along at least 19 ribonucleotides of antisense strand length to reduce target gene expression when the double stranded nucleic acid is introduced into a mammalian cell; and wherein the sense strand contains at least one motif of three 2′-F modifications on three consecutive nucleotides, where at least one of the motifs occurs at or near the cleavage site. The antisense strand contains at least one motif of three 2′-O-methyl modifications on three consecutive nucleotides at or near the cleavage site.

[0318] In one embodiment, the RNAi agent comprises sense and antisense strands, wherein the RNAi agent comprises a first strand having a length which is at least 25 and at most 29 nucleotides and a second strand having a length which is at most 30 nucleotides with at least one motif of three 2′-O-methyl modifications on three consecutive nucleotides at position 11, 12, 13 from the 5′ end; wherein the 3′ end of the first strand and the 5′ end of the second strand form a blunt end and the second strand is 14 nucleotides longer at its 3′ end than the first strand, wherein the duplex region which is at least 25 nucleotides in length, and the second strand is sufficiently complementary to a target mRNA along at least 19 nucleotide of the second strand length to reduce target gene expression when the RNAi agent is introduced into a mammalian cell, and wherein dicer cleavage of the RNAi agent preferentially results in an siRNA comprising the 3′ end of the second strand, thereby reducing expression of the target gene in the mammal. Optionally, the RNAi agent further comprises a ligand.

[0319] In one embodiment, the sense strand of the RNAi agent contains at least one motif of three identical modifications on three consecutive nucleotides, where one of the motifs occurs at the cleavage site in the sense strand.

[0320] In one embodiment, the antisense strand of the RNAi agent can also contain at least one motif of three identical modifications on three consecutive nucleotides, where one of the motifs occurs at or near the cleavage site in the antisense strand.

[0321] For an RNAi agent having a duplex region of 17-23 nucleotide in length, the cleavage site of the antisense strand is typically around the 10, 11 and 12 positions from the 5′-end. Thus the motifs of three identical modifications may occur at the 9, 10, 11 positions; 10, 11, 12 positions; 11, 12, 13 positions; 12, 13, 14 positions; or 13, 14, 15 positions of the antisense strand, the count starting from the 1^{st} nucleotide from the 5′-end of the antisense strand, or, the count starting from the 1^{st} paired nucleotide within the duplex region from the 5′-end of the antisense strand. The cleavage site in the antisense strand may also change according to the length of the duplex region of the RNAi from the 5′-end.

[0322] The sense strand of the RNAi agent may contain at least one motif of three identical modifications on three consecutive nucleotides at the cleavage site of the strand; and the antisense strand may have at least one motif of three identical modifications on three consecutive nucleotides at or near the cleavage site of the strand. When the sense strand and the antisense strand form a dsRNA duplex, the sense strand and the antisense strand can be so aligned that one motif of the three nucleotides on the sense strand and one motif of the three nucleotides on the antisense strand have at least one nucleotide overlap, i.e., at least one of the three nucleotides of the motif in the sense strand forms a base pair with at least one of the three nucleotides of the motif in the antisense strand. Alternatively, at least two nucleotides may overlap, or all three nucleotides may overlap.

[0323] In one embodiment, the sense strand of the RNAi agent may contain more than one motif of three identical modifications on three consecutive nucleotides. The first motif may occur at or near the cleavage site of the strand and the other motifs may be a wing modification. The term “wing modification” herein refers to a motif occurring at another portion of the strand that is separated from the motif at or near the cleavage site of the same strand. The wing modification is either adjacent to the first motif or is separated by at least one or more nucleotides. When the motifs are immediately adjacent to each other, then the chemistry of the motifs are distinct from each other and when the motifs are separated by one or more nucleotide than the chemistries can be the same or different. Two or more wing modifications may be present. For instance, when two wing modifications are present, each wing modification may occur at one end relative to the first motif which is at or near cleavage site or on either side of the lead motif.

[0324] Like the sense strand, the antisense strand of the RNAi agent may contain more than one motif of three identical modifications on three consecutive nucleotides, with at least one of the motifs occurring at or near the cleavage site of the strand. This antisense strand may also contain one or more wing modifications in an alignment similar to the wing modifications that may be present on the sense strand.

[0325] In one embodiment, the wing modification on the sense strand or antisense strand of the RNAi agent typically does not include the first one or two terminal nucleotides at the 3′-end, 5′-end or both ends of the strand.

[0326] In another embodiment, the wing modification on the sense strand or antisense strand of the RNAi agent typically does not include the first one or two paired nucleotides within the duplex region at the 3′-end, 5′-end or both ends of the strand.

[0327] When the sense strand and the antisense strand of the RNAi agent each contain at least one wing modification, the wing modifications may fall on the same end of the duplex region, and have an overlap of one, two or three nucleotides.

[0328] When the sense strand and the antisense strand of the RNAi agent each contain at least two wing modifications, the sense strand and the antisense strand can be so aligned that two modifications each from one strand fall on one end of the duplex region, having an overlap of one, two or three nucleotides; two modifications each from one strand fall on the other end of the duplex region, having an overlap of one, two or three nucleotides; two modifications one strand fall on each side of the lead motif, having an overlap of one, two, or three nucleotides in the duplex region.

[0329] In one embodiment, the RNAi agent comprises mismatch(es) with the target, within the duplex, or combinations thereof. The mismatch may occur in the overhang region or the duplex region. The base pair may be ranked on the basis of their propensity to promote dissociation or melting (e.g., on the free energy of association or dissociation of a particular pairing, the simplest approach is to examine the pairs on an individual pair basis, though next neighbor or similar analysis can also be used). In terms of promoting dissociation: A:U is preferred over G:C; G:U is preferred over G:C; and I:C is preferred over G:C (I=inosine). Mismatches, e.g., non-canonical or other than canonical pairings (as described elsewhere herein) are preferred over canonical (A:T, A:U, G:C) pairings; and pairings which include a universal base are preferred over canonical pairings.

[0330] In one embodiment, the RNAi agent comprises at least one of the first 1, 2, 3, 4, or 5 base pairs within the duplex regions from the 5′-end of the antisense strand independently selected from the group of: A:U, G:U, I:C, and mismatched pairs, e.g., non-canonical or other than canonical pairings or pairings which include a universal base, to promote the dissociation of the antisense strand at the 5′-end of the duplex.

[0331] In one embodiment, the nucleotide at the 1 position within the duplex region from the 5′-end in the antisense strand is selected from the group consisting of A, dA, dU, U, and dT. Alternatively, at least one of the first 1, 2 or 3 base pair within the duplex region from the 5′-end of the antisense strand is an AU base pair. For example, the first base pair within the duplex region from the 5′-end of the antisense strand is an AU base pair.

[0332] In another embodiment, the nucleotide at the 3′-end of the sense strand is deoxy-thymine (dT). In another embodiment, the nucleotide at the 3′-end of the antisense strand is deoxy-thymine (dT). In one embodiment, there is a short sequence of deoxy-thymine nucleotides, for example, two dT nucleotides on the 3′-end of the sense or antisense strand.

[0333] In one embodiment, the sense strand sequence may be represented by formula (I):

(I)
5′ nₚ-Nₐ-(X X )ᵢ-N_{b}-Y Y -N_{b}-(Z )ⱼ-Nₐ-n_{q} 3′

[0334] wherein:

[0335] i and j are each independently 0 or 1;

[0336] p and q are each independently 0-6;

[0337] each Nₐ independently represents an oligonucleotide sequence comprising 0-25 modified nucleotides, each sequence comprising at least two differently modified nucleotides;

[0338] each N_{b} independently represents an oligonucleotide sequence comprising 0-10 modified nucleotides;

[0339] each nₚ and n_{q} independently represent an overhang nucleotide;

[0340] wherein Nb and Y do not have the same modification; and

[0341] XXX, YYY and ZZZ each independently represent one motif of three identical modifications on three consecutive nucleotides. Preferably YYY is all 2′-F modified nucleotides.

[0342] In one embodiment, the Nₐ or N_{b} comprise modifications of alternating pattern.

[0343] In one embodiment, the YYY motif occurs at or near the cleavage site of the sense strand. For example, when the RNAi agent has a duplex region of 17-23 nucleotides in length, the YYY motif can occur at or the vicinity of the cleavage site (e.g.: can occur at positions 6, 7, 8, 7, 8, 9, 8, 9, 10, 9, 10, 11, 10, 11,12 or 11, 12, 13) of the sense strand, the count starting from the 1^{st} nucleotide, from the 5′-end; or optionally, the count starting at the 1^{st} paired nucleotide within the duplex region, from the 5′-end.

[0344] In one embodiment, i is 1 and j is 0, or i is 0 and j is 1, or both i and j are 1. The sense strand can therefore be represented by the following formulas:

(Ib)
5′ nₚ-Nₐ-YYY-N_{b}-ZZZ-Nₐ-n_{q} 3′;
(Ic)
5′ nₚ-Nₐ-XXX-N_{b}-YYY-Nₐ-n_{q} 3′;
or
(Id)
5′ nₚ-Nₐ-XXX-N_{b}-YYY-N_{b}-ZZZ-Nₐ-n_{q} 3′.

[0345] When the sense strand is represented by formula (Ib), N_{b} represents an oligonucleotide sequence comprising 0-10, 0-7, 0-5, 04, 0-2 or 0 modified nucleotides.

[0346] Each Nₐ independently can represent an oligonucleotide sequence comprising 2-20, 2-15, or 2-10 modified nucleotides.

[0347] When the sense strand is represented as formula (Ic), N_{b} represents an oligonucleotide sequence comprising 0-10, 0-7, 0-10, 0-7, 0-5, 0-4, 0-2 or 0 modified nucleotides. Each Nₐ can independently represent an oligonucleotide sequence comprising 2-20, 2-15, or 2-10 modified nucleotides.

[0348] When the sense strand is represented as formula (Id), each N_{b} independently represents an oligonucleotide sequence comprising 0-10, 0-7, 0-5, 0-4, 0-2 or 0 modified nucleotides. Preferably, N_{b} is 0, 1, 2, 3, 4, 5 or 6. Each Nₐ can independently represent an oligonucleotide sequence comprising 2-20, 2-15, or 2-10 modified nucleotides.

[0349] Each of X, Y and Z may be the same or different from each other.

[0350] In other embodiments, i is 0 and j is 0, and the sense strand may be represented by the formula:

(Ia)
5′ nₚ-Nₐ-YYY-Nₐ-n_{q} 3′.

[0351] When the sense strand is represented by formula (Ia), each Nₐ independently can represent an oligonucleotide sequence comprising 2-20, 2-15, or 2-10 modified nucleotides.

[0352] In one embodiment, the antisense strand sequence of the RNAi may be represented by formula (II):

(II)
5′ n_{q}′-Nₐ′-(Z′Z′Z′)ₖ-N_{b}′-Y′Y′Y′-N_{b}′-(X′X′X′)ₗ-
N′ₐ-nₚ′ 3′

[0353] wherein:

[0354] k and 1 are each independently 0 or 1;

[0355] p′ and q′ are each independently 0-6;

each Nₐ′ independently represents an oligonucleotide sequence comprising 0-25 modified nucleotides, each sequence comprising at least two differently modified nucleotides;
each N_{b}′ independently represents an oligonucleotide sequence comprising 0-10 modified nucleotides; each nₚ′ and n_{q}′ independently represent an overhang nucleotide;
wherein N_{b}′ and Y′ do not have the same modification;
and X′X′X′, Y′Y′Y′ and Z′Z′Z′ each independently represent one motif of three identical modifications on three consecutive nucleotides.
In one embodiment, the Nₐ′ or N_{b}′ comprise modifications of alternating pattern.

[0356] The Y′Y′Y′ motif occurs at or near the cleavage site of the antisense strand. For example, when the RNAi agent has a duplex region of 17-23 nucleotidein length, the Y′Y′Y′ motif can occur at positions 9, 10, 11;10, 11, 12; 11, 12, 13; 12, 13, 14; or 13, 14, 15 of the antisense strand, with the count starting from the 1^{st} nucleotide, from the 5′-end; or optionally, the count starting at the 1^{st} paired nucleotide within the duplex region, from the 5′-end. Preferably, the Y′Y′Y′ motif occurs at positions 11, 12, 13.

[0357] In one embodiment, Y′Y′Y′ motif is all 2′-OMe modified nucleotides.

[0358] In one embodiment, k is 1 and 1 is 0, or k is 0 and 1 is 1, or both k and 1 are 1.

[0359] The antisense strand can therefore be represented by the following formulas:

(IIb)
5′ n_{q}′-Nₐ′-Z′Z′Z′-N_{b}′-Y′Y′Y′-Nₐ′-nₚ′ 3′;
(IIc)
5′ n_{q}′-Nₐ′-Y′Y′Y′-N_{b}′-X′X′X′-nₚ′ 3′;
or
(IId)
5′ n_{q}′-Nₐ′-Z′Z′Z′-N_{b}′-Y′Y′Y′-N_{b}′-X′X′X′-Nₐ′-nₚ′ 3′.

[0360] When the antisense strand is represented by formula (IIb), N_{b} represents an oligonucleotide sequence comprising 0-10, 0-7, 0-10, 0-7, 0-5, 0-4, 0-2 or 0 modified nucleotides. Each Nₐ′ independently represents an oligonucleotide sequence comprising 2-20, 2-15, or 2-10 modified nucleotides.

[0361] When the antisense strand is represented as formula (IIc), N_{b}′ represents an oligonucleotide sequence comprising 0-10, 0-7, 0-10, 0-7, 0-5, 0-4, 0-2 or 0 modified nucleotides. Each Nₐ′ independently represents an oligonucleotide sequence comprising 2-20, 2-15, or 2-10 modified nucleotides.

[0362] When the antisense strand is represented as formula (IId), each N_{b}′ independently represents an oligonucleotide sequence comprising 0-10, 0-7, 0-10, 0-7, 0-5, 0-4, 0-2 or 0 modified nucleotides. Each Nₐ′ independently represents an oligonucleotide sequence comprising 2-20, 2-15, or 2-10 modified nucleotides. Preferably, N_{b} is 0, 1, 2, 3, 4, 5 or 6.

[0363] In other embodiments, k is 0 and 1 is 0 and the antisense strand may be represented by the formula:

(Ia)
5′ n_{p′}-N_{a'}-Y′Y′Y′-N_{a′}-n_{q′} 3′.

[0364] When the antisense strand is represented as formula (IIa), each Nₐ′ independently represents an oligonucleotide sequence comprising 2-20, 2-15, or 2-10 modified nucleotides.

[0365] Each of X′, Y′ and Z′ may be the same or different from each other.

[0366] Each nucleotide of the sense strand and antisense strand may be independently modified with LNA, HNA, CeNA, 2′-methoxyethyl, 2′-O-methyl, 2′-O-allyl, 2′-C-allyl, 2′-hydroxyl, or 2′-fluoro. For example, each nucleotide of the sense strand and antisense strand is independently modified with 2′-O-methyl or 2′-fluoro. Each X, Y, Z, X′, Y′ and Z′, in particular, may represent a 2′-O-methyl modification or a 2′-fluoro modification.

[0367] In one embodiment, the sense strand of the RNAi agent may contain YYY motif occurring at 9, 10 and 11 positions of the strand when the duplex region is 21 nt, the count starting from the 1^{st} nucleotide from the 5′-end, or optionally, the count starting at the 1^{st} paired nucleotide within the duplex region, from the 5′-end; and Y represents 2′-F modification. The sense strand may additionally contain XXX motif or ZZZ motifs as wing modifications at the opposite end of the duplex region; and XXX and ZZZ each independently represents a 2′-OMe modification or 2′-F modification.

[0368] In one embodiment the antisense strand may contain Y′Y′Y′ motif occurring at positions 11, 12, 13 of the strand, the count starting from the 1^{st} nucleotide from the 5′-end, or optionally, the count starting at the 1^{st} paired nucleotide within the duplex region, from the 5′-end; and Y′ represents 2′-O-methyl modification. The antisense strand may additionally contain X′X′X′ motif or Z′Z′Z′ motifs as wing modifications at the opposite end of the duplex region; and X′X′X′ and Z′Z′Z′ each independently represents a 2′-OMe modification or 2′-F modification.

[0369] The sense strand represented by any one of the above formulas (Ia), (Ib), (Ic), and (Id) forms a duplex with an antisense strand being represented by any one of formulas (IIa), (IIb), (IIc), and (IId), respectively.

[0370] Accordingly, the RNAi agents for use in the methods of the disclosure may comprise a sense strand and an antisense strand, each strand having 14 to 30 nucleotides, the RNAi duplex represented by formula (III):

(III)
sense:
5′ nₚ-Nₐ-(X X X)ᵢ-N_{b}-Y Y Y-N_{b}-(Z Z Z)ⱼ-Nₐ-n_{q} 3′
antisense:
3′ nₚ′-Nₐ′-(X′X′X′)ₖ-N_{b}′-Y′Y′Y′-N_{b}′-(Z′Z′Z′)ₗ-Nₐ′-
n_{q}′ 5′

[0371] wherein:

[0372] i, j, k, and 1 are each independently 0 or 1;

[0373] p, p′, q, and q′ are each independently 0-6;

[0374] each Nₐ and Nₐ′ independently represents an oligonucleotide sequence comprising 0-25 modified nucleotides, each sequence comprising at least two differently modified nucleotides;

[0375] each N_{b} and N_{b}′ independently represents an oligonucleotide sequence comprising 0-10 modified nucleotides;

[0376] wherein

[0377] each nₚ′, nₚ, n_{q}′, and n_{q}, each of which may or may not be present, independently represents an overhang nucleotide; and

[0378] XXX, YYY, ZZZ, X′X′X′, Y′Y′Y′, and Z′Z′Z′ each independently represent one motif of three identical modifications on three consecutive nucleotides.

[0379] In one embodiment, i is 0 and j is 0; or i is 1 and j is 0; or i is 0 and j is 1; or both i and j are 0; or both i and j are 1. In another embodiment, k is 0 and 1 is 0; or k is 1 and 1 is 0; k is 0 and 1 is 1; or both k and 1 are 0; or both k and 1 are 1.

[0380] Exemplary combinations of the sense strand and antisense strand forming an RNAi duplex include the formulas below:

5′ nₚ-Nₐ-Y Y Y-Nₐ-n_{q} 3′
(IIIa)
3′ nₚ′-Nₐ′-Y′Y′Y′-Nₐ′n_{q}′ 5′
5′ nₚ-Nₐ-Y Y Y-N_{b}-Z Z Z-Nₐ-n_{q} 3′
(IIIb)
3′ nₚ′-Nₐ′-Y′Y′Y′-N_{b}′-Z′Z′Z′-Nₐ′n_{q}′ 5′
5′ nₚ-Nₐ-X X X-N_{b}-Y Y Y-Nₐ-n_{q} 3′
(IIIc)
3′ nₚ′-Nₐ′-X′X′X′-N_{b}′-Y′Y′Y′-Nₐ′-n_{q}′ 5′
5′ nₚ-Nₐ-X X X-N_{b}-Y Y Y-N_{b}-Z Z Z-Nₐ-n_{q} 3′
(IIId)
3′ nₚ′-Nₐ′-X′X′X′-N_{b}′-Y′Y′Y′-N_{b}′-Z′Z′Z′-Nₐ-n_{q}′ 5′

[0381] When the RNAi agent is represented by formula (IIIa), each Nₐ independently represents an oligonucleotide sequence comprising 2-20, 2-15, or 2-10 modified nucleotides.

[0382] When the RNAi agent is represented by formula (IIIb), each N_{b} independently represents an oligonucleotide sequence comprising 1-10, 1-7, 1-5 or 1-4 modified nucleotides. Each Nₐ independently represents an oligonucleotide sequence comprising 2-20, 2-15, or 2-10 modified nucleotides.

[0383] When the RNAi agent is represented as formula (IIIc), each N_{b}, N_{b}′ independently represents an oligonucleotide sequence comprising 0-10, 0-7, 0-10, 0-7, 0-5, 0-4, 0-2 or 0 modified nucleotides. Each Nₐ independently represents an oligonucleotide sequence comprising 2-20, 2-15, or 2-10 modified nucleotides.

[0384] When the RNAi agent is represented as formula (IIId), each N_{b}, N_{b}′ independently represents an oligonucleotide sequence comprising 0-10, 0-7, 0-10, 0-7, 0-5, 0-4, 0-2 or 0 modified nucleotides. Each Nₐ, Nₐ′ independently represents an oligonucleotide sequence comprising 2-20, 2-15, or 2-10 modified nucleotides. Each of Nₐ, Nₐ′, N_{b} and N_{b}′ independently comprises modifications of alternating pattern.

[0385] In one embodiment, when the RNAi agent is represented by formula (IIId), the Nₐ modifications are 2′-O-methyl or 2′-fluoro modifications. In another embodiment, when the RNAi agent is represented by formula (IIId), the Nₐ modifications are 2′-O-methyl or 2′-fluoro modifications and nₚ′>0 and at least one nₚ′ is linked to a neighboring nucleotide a via phosphorothioate linkage. In yet another embodiment, when the RNAi agent is represented by formula (IIId), the Nₐ modifications are 2′-O-methyl or 2′-fluoro modifications, nₚ′>0 and at least one nₚ′ is linked to a neighboring nucleotide via phosphorothioate linkage, and the sense strand is conjugated to one or more C16 (or related) moieties attached through a bivalent or trivalent branched linker (described below). In another embodiment, when the RNAi agent is represented by formula (IIId), the Nₐ modifications are 2′-O-methyl or 2′-fluoro modifications, nₚ′>0 and at least one nₚ′ is linked to a neighboring nucleotide via phosphorothioate linkage, the sense strand comprises at least one phosphorothioate linkage, and the sense strand is conjugated to one or more lipophilic, e.g., C16 (or related) moieties, optionally attached through a bivalent or trivalent branched linker.

[0386] In one embodiment, when the RNAi agent is represented by formula (IIIa), the Nₐ modifications are 2′-O-methyl or 2′-fluoro modifications, nₚ′>0 and at least one nₚ′ is linked to a neighboring nucleotide via phosphorothioate linkage, the sense strand comprises at least one phosphorothioate linkage, and the sense strand is conjugated to one or more lipophilic, e.g., C16 (or related) moieties attached through a bivalent or trivalent branched linker.

[0387] In one embodiment, the RNAi agent is a multimer containing at least two duplexes represented by formula (III), (IIIa), (IIIb), (IIIc), and (IIId), wherein the duplexes are connected by a linker. The linker can be cleavable or non-cleavable. Optionally, the multimer further comprises a ligand. Each of the duplexes can target the same gene or two different genes; or each of the duplexes can target same gene at two different target sites.

[0388] In one embodiment, the RNAi agent is a multimer containing three, four, five, six or more duplexes represented by formula (III), (IIIa), (IIIb), (IIIc), and (IIId), wherein the duplexes are connected by a linker. The linker can be cleavable or non-cleavable. Optionally, the multimer further comprises a ligand. Each of the duplexes can target the same gene or two different genes; or each of the duplexes can target same gene at two different target sites.

[0389] In one embodiment, two RNAi agents represented by formula (III), (IIIa), (IIIb), (IIIc), and (IIId) are linked to each other at the 5′ end, and one or both of the 3′ ends and are optionally conjugated to a ligand. Each of the agents can target the same gene or two different genes; or each of the agents can target same gene at two different target sites.

[0390] Various publications describe multimeric RNAi agents that can be used in the methods of the disclosure. Such publications include WO2007/091269, WO2010/141511, WO2007/117686, WO2009/014887, and WO2011/031520; and U.S. Pat. No. 7,858,769, the entire contents of each of which are hereby incorporated herein by reference.

[0391] In certain embodiments, the compositions and methods of the disclosure include a vinyl phosphonate (VP) modification of an RNAi agent as described herein. In exemplary embodiments, a vinyl phosphonate of the disclosure has the following structure:

[chemical structure]

[0392] A vinyl phosphonate of the instant disclosure may be attached to either the antisense or the sense strand of a dsRNA of the disclosure. In certain embodiments, a vinyl phosphonate of the instant disclosure is attached to the antisense strand of a dsRNA, optionally at the 5′ end of the antisense strand of the dsRNA. The dsRNA agent can comprise a phosphorus-containing group at the 5′-end of the sense strand or antisense strand. The 5′-end phosphorus-containing group can be 5′-end phosphate (5′-P), 5′-end phosphorothioate (5′-PS), 5′-end phosphorodithioate (5′-PS2), 5′-end vinylphosphonate (5′-VP), 5′-end methylphosphonate (MePhos), or 5′-deoxy-5′-C-malonyl. When the 5′-end phosphorus-containing group is 5′-end vinylphosphonate (5′-VP), the 5′-VP can be either 5′-E-VP isomer (i.e., trans-vinylphosphate, isomer (i.e., cis-vinylphosphate,) or mixtures thereof.

[0393] For example, when the phosphate mimic is a 5′-vinyl phosphonate (VP), the 5′-terminal nucleotide can have the following structure,

[chemical structure]

[0394] wherein * indicates the location of the bond to 5′-position of the adjacent nucleotide;

[0395] R is hydrogen, hydroxy, methoxy or fluoro (e.g., hydroxy); and

[0396] B is a nucleobase or a modified nucleobase, optionally where B is adenine, guanine, cytosine, thymine or uracil.

[0397] Vinyl phosphate modifications are also contemplated for the compositions and methods of the instant disclosure. An exemplary vinyl phosphate structure is:

[chemical structure]

[0398] i. Thermally Destabilizing Modifications

[0399] In certain embodiments, a dsRNA molecule can be optimized for RNA interference by incorporating thermally destabilizing modifications in the seed region of the antisense strand (i.e., at positions 2-9 of the 5′-end of the antisense strand) to reduce or inhibit off-target gene silencing. It has been discovered that dsRNAs with an antisense strand comprising at least one thermally destabilizing modification of the duplex within the first 9 nucleotide positions, counting from the 5′ end, of the antisense strand have reduced off-target gene silencing activity. Accordingly, in some embodiments, the antisense strand comprises at least one (e.g., one, two, three, four, five or more) thermally destabilizing modification of the duplex within the first 9 nucleotide positions of the 5′ region of the antisense strand. In some embodiments, one or more thermally destabilizing modification(s) of the duplex is/are located in positions 2-9, or preferably positions 4-8, from the 5′-end of the antisense strand. In some further embodiments, the thermally destabilizing modification(s) of the duplex is/are located at position 6, 7 or 8 from the 5′-end of the antisense strand. In still some further embodiments, the thermally destabilizing modification of the duplex is located at position 7 from the 5′-end of the antisense strand. The term “thermally destabilizing modification(s)” includes modification(s) that would result with a dsRNA with a lower overall melting temperature (Tm) (preferably a Tm with one, two, three or four degrees lower than the Tm of the dsRNA without having such modification(s). In some embodiments, the thermally destabilizing modification of the duplex is located at position 2, 3, 4, 5 or 9 from the 5′-end of the antisense strand.

[0400] The thermally destabilizing modifications can include, but are not limited to, abasic modification; mismatch with the opposing nucleotide in the opposing strand; and sugar modification such as 2′-deoxy modification or acyclic nucleotide, e.g., unlocked nucleic acids (UNA) or glycol nucleic acid (GNA).

[0401] Exemplified abasic modifications include, but are not limited to the following:

[chemical structure]

### Wherein R═H, Me, Et or OMe; R′═H, Me, Et or OMe; R″═H, Me, Et or OMe

[chemical structure]

wherein B is a modified or unmodified nucleobase.

[0403] Exemplified sugar modifications include, but are not limited to the following:

[chemical structure]

wherein B is a modified or unmodified nucleobase.

[0404] In some embodiments the thermally destabilizing modification of the duplex is selected from the group consisting of:

[chemical structure]

wherein B is a modified or unmodified nucleobase and the asterisk on each structure represents either R, S or racemic.

[0405] The term “acyclic nucleotide” refers to any nucleotide having an acyclic ribose sugar, for example, where any of bonds between the ribose carbons (e.g., C1′—C2′, C2′—C3′, C3′—C4′, C4′-O4′, or C1′-O4′) is absent or at least one of ribose carbons or oxygen (e.g., C1′, C2′, C3′, C4′ or O4′) are independently or in combination absent from the nucleotide. In some embodiments, acyclic nucleotide is

[chemical structure]

wherein B is a modified or unmodified nucleobase, R¹ and R² independently are H, halogen, OR₃, or alkyl; and R₃ is H, alkyl, cycloalkyl, aryl, aralkyl, heteroaryl or sugar). The acyclic derivative provides greater backbone flexibility without affecting the Watson-Crick pairings. The acyclic nucleotide can be linked via 2′-5′ or 3′-5′ linkage.

[0406] The term ‘GNA’ refers to glycol nucleic acid which is a polymer similar to DNA or RNA but differing in the composition of its “backbone” in that is composed of repeating glycerol units linked by phosphodiester bonds:

[chemical structure]

[0407] The thermally destabilizing modification of the duplex can be mismatches (i.e., noncomplementary base pairs) between the thermally destabilizing nucleotide and the opposing nucleotide in the opposite strand within the dsRNA duplex. Exemplary mismatch base pairs include G:G, G:A, G:U, G:T, A:A, A:C, C:C, C:U, C:T, U:U, T:T, U:T, or a combination thereof. Other mismatch base pairings known in the art are also amenable to the present invention. A mismatch can occur between nucleotides that are either naturally occurring nucleotides or modified nucleotides, i.e., the mismatch base pairing can occur between the nucleobases from respective nucleotides independent of the modifications on the ribose sugars of the nucleotides. In certain embodiments, the dsRNA molecule contains at least one nucleobase in the mismatch pairing that is a 2′-deoxy nucleobase; e.g., the 2′-deoxy nucleobase is in the sense strand.

[0408] In some embodiments, the thermally destabilizing modification of the duplex in the seed region of the antisense strand includes nucleotides with impaired W-C H-bonding to complementary base on the target mRNA, such as:

[chemical structure]

[0409] More examples of abasic nucleotide, acyclic nucleotide modifications (including UNA and GNA), and mismatch modifications have been described in detail in WO 2011/133876, which is herein incorporated by reference in its entirety.

The thermally destabilizing modifications may also include universal base with reduced or abolished capability to form hydrogen bonds with the opposing bases, and phosphate modifications.

[0410] In some embodiments, the thermally destabilizing modification of the duplex includes nucleotides with non-canonical bases such as, but not limited to, nucleobase modifications with impaired or completely abolished capability to form hydrogen bonds with bases in the opposite strand. These nucleobase modifications have been evaluated for destabilization of the central region of the dsRNA duplex as described in WO 2010/0011895, which is herein incorporated by reference in its entirety. Exemplary nucleobase modifications are:

[chemical structure]

[0411] In some embodiments, the thermally destabilizing modification of the duplex in the seed region of the antisense strand includes one or more α-nucleotide complementary to the base on the target mRNA, such as:

[chemical structure]

wherein R is H, OH, OCH₃, F, NH₂, NHMe, NMe₂ or O-alkyl.

[0412] Exemplary phosphate modifications known to decrease the thermal stability of dsRNA duplexes compared to natural phosphodiester linkages are:

[chemical structure]

[0413] The alkyl for the R group can be a C₁-C₆alkyl. Specific alkyls for the R group include, but are not limited to methyl, ethyl, propyl, isopropyl, butyl, pentyl and hexyl.

[0414] As the skilled artisan will recognize, in view of the functional role of nucleobases is defining specificity of an RNAi agent of the disclosure, while nucleobase modifications can be performed in the various manners as described herein, e.g., to introduce destabilizing modifications into an RNAi agent of the disclosure, e.g., for purpose of enhancing on-target effect relative to off-target effect, the range of modifications available and, in general, present upon RNAi agents of the disclosure tends to be much greater for non-nucleobase modifications, e.g., modifications to sugar groups or phosphate backbones of polyribonucleotides. Such modifications are described in greater detail in other sections of the instant disclosure and are expressly contemplated for RNAi agents of the disclosure, either possessing native nucleobases or modified nucleobases as described above or elsewhere herein.

[0415] In addition to the antisense strand comprising a thermally destabilizing modification, the dsRNA can also comprise one or more stabilizing modifications. For example, the dsRNA can comprise at least two (e.g., two, three, four, five, six, seven, eight, nine, ten or more) stabilizing modifications. Without limitations, the stabilizing modifications all can be present in one strand. In some embodiments, both the sense and the antisense strands comprise at least two stabilizing modifications. The stabilizing modification can occur on any nucleotide of the sense strand or antisense strand. For instance, the stabilizing modification can occur on every nucleotide on the sense strand or antisense strand; each stabilizing modification can occur in an alternating pattern on the sense strand or antisense strand; or the sense strand or antisense strand comprises both stabilizing modification in an alternating pattern. The alternating pattern of the stabilizing modifications on the sense strand may be the same or different from the antisense strand, and the alternating pattern of the stabilizing modifications on the sense strand can have a shift relative to the alternating pattern of the stabilizing modifications on the antisense strand.

[0416] In some embodiments, the antisense strand comprises at least two (e.g., two, three, four, five, six, seven, eight, nine, ten or more) stabilizing modifications. Without limitations, a stabilizing modification in the antisense strand can be present at any positions. In some embodiments, the antisense comprises stabilizing modifications at positions 2, 6, 8, 9, 14, and 16 from the 5′-end. In some other embodiments, the antisense comprises stabilizing modifications at positions 2, 6, 14, and 16 from the 5′-end. In still some other embodiments, the antisense comprises stabilizing modifications at positions 2, 14, and 16 from the 5′-end.

[0417] In some embodiments, the antisense strand comprises at least one stabilizing modification adjacent to the destabilizing modification. For example, the stabilizing modification can be the nucleotide at the 5′-end or the 3′-end of the destabilizing modification, i.e., at position −1 or +1 from the position of the destabilizing modification. In some embodiments, the antisense strand comprises a stabilizing modification at each of the 5′-end and the 3′-end of the destabilizing modification, i.e., positions −1 and +1 from the position of the destabilizing modification.

[0418] In some embodiments, the antisense strand comprises at least two stabilizing modifications at the 3′-end of the destabilizing modification, i.e., at positions +1 and +2 from the position of the destabilizing modification.

[0419] In some embodiments, the sense strand comprises at least two (e.g., two, three, four, five, six, seven, eight, nine, ten or more) stabilizing modifications. Without limitations, a stabilizing modification in the sense strand can be present at any positions. In some embodiments, the sense strand comprises stabilizing modifications at positions 7, 10, and 11 from the 5′-end. In some other embodiments, the sense strand comprises stabilizing modifications at positions 7, 9, 10, and 11 from the 5′-end. In some embodiments, the sense strand comprises stabilizing modifications at positions opposite or complementary to positions 11, 12, and 15 of the antisense strand, counting from the 5′-end of the antisense strand. In some other embodiments, the sense strand comprises stabilizing modifications at positions opposite or complementary to positions 11, 12, 13, and 15 of the antisense strand, counting from the 5′-end of the antisense strand. In some embodiments, the sense strand comprises a block of two, three, or four stabilizing modifications.

[0420] In some embodiments, the sense strand does not comprise a stabilizing modification in position opposite or complementary to the thermally destabilizing modification of the duplex in the antisense strand.

[0421] Exemplary thermally stabilizing modifications include, but are not limited to, 2′-fluoro modifications. Other thermally stabilizing modifications include, but are not limited to, LNA.

[0422] In some embodiments, the dsRNA of the disclosure comprises at least four (e.g., four, five, six, seven, eight, nine, ten, or more) 2′-fluoro nucleotides. Without limitations, the 2′-fluoro nucleotides all can be present in one strand. In some embodiments, both the sense and the antisense strands comprise at least two 2′-fluoro nucleotides. The 2′-fluoro modification can occur on any nucleotide of the sense strand or antisense strand. For instance, the 2′-fluoro modification can occur on every nucleotide on the sense strand or antisense strand; each 2′-fluoro modification can occur in an alternating pattern on the sense strand or antisense strand; or the sense strand or antisense strand comprises both 2′-fluoro modifications in an alternating pattern. The alternating pattern of the 2′-fluoro modifications on the sense strand may be the same or different from the antisense strand, and the alternating pattern of the 2′-fluoro modifications on the sense strand can have a shift relative to the alternating pattern of the 2′-fluoro modifications on the antisense strand.

[0423] In some embodiments, the antisense strand comprises at least two (e.g., two, three, four, five, six, seven, eight, nine, ten, or more) 2′-fluoro nucleotides. Without limitations, a 2′-fluoro modification in the antisense strand can be present at any positions. In some embodiments, the antisense comprises 2′-fluoro nucleotides at positions 2, 6, 8, 9, 14, and 16 from the 5′-end. In some other embodiments, the antisense comprises 2′-fluoro nucleotides at positions 2, 6, 14, and 16 from the 5′-end. In still some other embodiments, the antisense comprises 2′-fluoro nucleotides at positions 2, 14, and 16 from the 5′-end.

[0424] In some embodiments, the antisense strand comprises at least one 2′-fluoro nucleotide adjacent to the destabilizing modification. For example, the 2′-fluoro nucleotide can be the nucleotide at the 5′-end or the 3′-end of the destabilizing modification, i.e., at position −1 or +1 from the position of the destabilizing modification. In some embodiments, the antisense strand comprises a 2′-fluoro nucleotide at each of the 5′-end and the 3′-end of the destabilizing modification, i.e., positions −1 and +1 from the position of the destabilizing modification.

[0425] In some embodiments, the antisense strand comprises at least two 2′-fluoro nucleotides at the 3′-end of the destabilizing modification, i.e., at positions +1 and +2 from the position of the destabilizing modification.

[0426] In some embodiments, the sense strand comprises at least two (e.g., two, three, four, five, six, seven, eight, nine, ten or more) 2′-fluoro nucleotides. Without limitations, a 2′-fluoro modification in the sense strand can be present at any positions. In some embodiments, the antisense comprises 2′-fluoro nucleotides at positions 7, 10, and 11 from the 5′-end. In some other embodiments, the sense strand comprises 2′-fluoro nucleotides at positions 7, 9, 10, and 11 from the 5′-end. In some embodiments, the sense strand comprises 2′-fluoro nucleotides at positions opposite or complementary to positions 11, 12, and 15 of the antisense strand, counting from the 5′-end of the antisense strand. In some other embodiments, the sense strand comprises 2′-fluoro nucleotides at positions opposite or complementary to positions 11, 12, 13, and 15 of the antisense strand, counting from the 5′-end of the antisense strand. In some embodiments, the sense strand comprises a block of two, three or four 2′-fluoro nucleotides.

[0427] In some embodiments, the sense strand does not comprise a 2′-fluoro nucleotide in position opposite or complementary to the thermally destabilizing modification of the duplex in the antisense strand.

[0428] In some embodiments, the dsRNA molecule of the disclosure comprises a 21 nucleotides (nt) sense strand and a 23 nucleotides (nt) antisense, wherein the antisense strand contains at least one thermally destabilizing nucleotide, where the at least one thermally destabilizing nucleotide occurs in the seed region of the antisense strand (i.e., at position 2-9 of the 5′-end of the antisense strand), wherein one end of the dsRNA is blunt, while the other end is comprises a 2 nt overhang, and wherein the dsRNA optionally further has at least one (e.g., one, two, three, four, five, six or all seven) of the following characteristics: (i) the antisense comprises 2, 3, 4, 5 or 6 2′-fluoro modifications; (ii) the antisense comprises 1, 2, 3, 4 or 5 phosphorothioate internucleotide linkages; (iii) the sense strand is conjugated with a ligand; (iv) the sense strand comprises 2, 3, 4 or 5 2′-fluoro modifications; (v) the sense strand comprises 1, 2, 3, 4 or 5 phosphorothioate internucleotide linkages; (vi) the dsRNA comprises at least four 2′-fluoro modifications; and (vii) the dsRNA comprises a blunt end at 5′-end of the antisense strand. Preferably, the 2 nt overhang is at the 3′-end of the antisense.

[0429] In some embodiments, the dsRNA molecule of the disclosure comprising a sense and antisense strands, wherein: the sense strand is 25-30 nucleotide residues in length, wherein starting from the 5′ terminal nucleotide (position 1), positions 1 to 23 of said sense strand comprise at least 8 ribonucleotides; antisense strand is 36-66 nucleotide residues in length and, starting from the 3′ terminal nucleotide, at least 8 ribonucleotides in the positions paired with positions 1-23 of sense strand to form a duplex; wherein at least the 3′ terminal nucleotide of antisense strand is unpaired with sense strand, and up to 6 consecutive 3′ terminal nucleotides are unpaired with sense strand, thereby forming a 3′ single stranded overhang of 1-6 nucleotides; wherein the 5′ terminus of antisense strand comprises from 10-30 consecutive nucleotides which are unpaired with sense strand, thereby forming a 10-30 nucleotide single stranded 5′ overhang; wherein at least the sense strand 5′ terminal and 3′ terminal nucleotides are base paired with nucleotides of antisense strand when sense and antisense strands are aligned for maximum complementarity, thereby forming a substantially duplexed region between sense and antisense strands; and antisense strand is sufficiently complementary to a target RNA along at least 19 ribonucleotides of antisense strand length to reduce target gene expression when said double stranded nucleic acid is introduced into a mammalian cell; and wherein the antisense strand contains at least one thermally destabilizing nucleotide, where at least one thermally destabilizing nucleotide is in the seed region of the antisense strand (i.e. at position 2-9 of the 5′-end of the antisense strand). For example, the thermally destabilizing nucleotide occurs between positions opposite or complementary to positions 14-17 of the 5′-end of the sense strand, and wherein the dsRNA optionally further has at least one (e.g., one, two, three, four, five, six or all seven) of the following characteristics: (i) the antisense comprises 2, 3, 4, 5, or 6 2′-fluoro modifications; (ii) the antisense comprises 1, 2, 3, 4, or 5 phosphorothioate internucleotide linkages; (iii) the sense strand is conjugated with a ligand; (iv) the sense strand comprises 2, 3, 4, or 5 2′-fluoro modifications; (v) the sense strand comprises 1, 2, 3, 4, or 5 phosphorothioate internucleotide linkages; and (vi) the dsRNA comprises at least four 2′-fluoro modifications; and (vii) the dsRNA comprises a duplex region of 12-30 nucleotide pairs in length.

[0430] In some embodiments, the dsRNA molecule of the disclosure comprises a sense and antisense strands, wherein said dsRNA molecule comprises a sense strand having a length which is at least 25 and at most 29 nucleotides and an antisense strand having a length which is at most 30 nucleotides with the sense strand comprises a modified nucleotide that is susceptible to enzymatic degradation at position 11 from the 5′end, wherein the 3′ end of said sense strand and the 5′ end of said antisense strand form a blunt end and said antisense strand is 1-4 nucleotides longer at its 3′ end than the sense strand, wherein the duplex region which is at least 25 nucleotides in length, and said antisense strand is sufficiently complementary to a target mRNA along at least 19 nt of said antisense strand length to reduce target gene expression when said dsRNA molecule is introduced into a mammalian cell, and wherein dicer cleavage of said dsRNA preferentially results in an siRNA comprising said 3′ end of said antisense strand, thereby reducing expression of the target gene in the mammal, wherein the antisense strand contains at least one thermally destabilizing nucleotide, where the at least one thermally destabilizing nucleotide is in the seed region of the antisense strand (i.e. at position 2-9 of the 5′-end of the antisense strand), and wherein the dsRNA optionally further has at least one (e.g., one, two, three, four, five, six or all seven) of the following characteristics: (i) the antisense comprises 2, 3, 4, 5, or 6 2′-fluoro modifications; (ii) the antisense comprises 1, 2, 3, 4, or 5 phosphorothioate internucleotide linkages; (iii) the sense strand is conjugated with a ligand; (iv) the sense strand comprises 2, 3, 4, or 5 2′-fluoro modifications; (v) the sense strand comprises 1, 2, 3, 4, or 5 phosphorothioate internucleotide linkages; and (vi) the dsRNA comprises at least four 2′-fluoro modifications; and (vii) the dsRNA has a duplex region of 12-29 nucleotide pairs in length.

[0431] In some embodiments, every nucleotide in the sense strand and antisense strand of the dsRNA molecule may be modified. Each nucleotide may be modified with the same or different modification which can include one or more alteration of one or both of the non-linking phosphate oxygens or of one or more of the linking phosphate oxygens; alteration of a constituent of the ribose sugar, e.g., of the 2′ hydroxyl on the ribose sugar; wholesale replacement of the phosphate moiety with “dephospho” linkers; modification or replacement of a naturally occurring base; and replacement or modification of the ribose-phosphate backbone.

[0432] As nucleic acids are polymers of subunits, many of the modifications occur at a position which is repeated within a nucleic acid, e.g., a modification of a base, or a phosphate moiety, or a non-linking O of a phosphate moiety. In some cases, the modification will occur at all of the subject positions in the nucleic acid but in many cases it will not. By way of example, a modification may only occur at a 3′ or 5′ terminal position, may only occur in a terminal region, e.g., at a position on a terminal nucleotide or in the last 2, 3, 4, 5, or 10 nucleotides of a strand. A modification may occur in a double strand region, a single strand region, or in both. A modification may occur only in the double strand region of an RNA or may only occur in a single strand region of an RNA. E.g., a phosphorothioate modification at a non-linking O position may only occur at one or both termini, may only occur in a terminal region, e.g., at a position on a terminal nucleotide or in the last 2, 3, 4, 5, or 10 nucleotides of a strand, or may occur in double strand and single strand regions, particularly at termini. The 5′ end or ends can be phosphorylated.

[0433] It may be possible, e.g., to enhance stability, to include particular bases in overhangs, or to include modified nucleotides or nucleotide surrogates, in single strand overhangs, e.g., in a 5′ or 3′ overhang, or in both. E.g., it can be desirable to include purine nucleotides in overhangs. In some embodiments all or some of the bases in a 3′ or 5′ overhang may be modified, e.g., with a modification described herein. Modifications can include, e.g., the use of modifications at the 2′ position of the ribose sugar with modifications that are known in the art, e.g., the use of deoxyribonucleotides, 2′-deoxy-2′-fluoro (2′-F) or 2′-O-methyl modified instead of the ribosugar of the nucleobase, and modifications in the phosphate group, e.g., phosphorothioate modifications. Overhangs need not be homologous with the target sequence.

[0434] In some embodiments, each residue of the sense strand and antisense strand is independently modified with locked nucleic acid (LNA), unlocked nucleic acid (UNA), cyclohexene nucleic acid (CeNA), 2′-methoxyethyl, 2′-O-methyl, 2′-O-allyl, 2′-C-allyl, 2′-deoxy, or 2′-fluoro. The strands can contain more than one modification. In some embodiments, each residue of the sense strand and antisense strand is independently modified with 2′-O-methyl or 2′-fluoro. It is to be understood that these modifications are in addition to the at least one thermally destabilizing modification of the duplex present in the antisense strand.

[0435] At least two different modifications are typically present on the sense strand and antisense strand. Those two modifications may be the 2′-deoxy, 2′-O-methyl or 2′-fluoro modifications, acyclic nucleotides or others. In some embodiments, the sense strand and antisense strand each comprises two differently modified nucleotides selected from 2′-O-methyl or 2′-deoxy. In some embodiments, each residue of the sense strand and antisense strand is independently modified with 2′-O-methyl nucleotide, 2′-deoxy nucleotide, 2′-deoxy-2′-fluoro nucleotide, 2′-O—N-methylacetamido (2′-O-NMA) nucleotide, a 2′-O-dimethylaminoethoxyethyl (2′-O-DMAEOE) nucleotide, 2′-O-aminopropyl (2′-O-AP) nucleotide, or 2′-ara-F nucleotide. Again, it is to be understood that these modifications are in addition to the at least one thermally destabilizing modification of the duplex present in the antisense strand.

[0436] In some embodiments, the dsRNA molecule of the disclosure comprises modifications of an alternating pattern, particular in the B1, B2, B3, B1′, B2′, B3′, B4′ regions. The term “alternating motif” or “alternative pattern” as used herein refers to a motif having one or more modifications, each modification occurring on alternating nucleotides of one strand. The alternating nucleotide may refer to one per every other nucleotide or one per every three nucleotides, or a similar pattern. For example, if A, B and C each represent one type of modification to the nucleotide, the alternating motif can be “ABABABABABAB . . . ,” “AABBAABBAABB . . . ,” “AABAABAABAAB . . . ,” “AAABAAABAAAB . . . ,” “AAABBBAAABBB . . . ,” or “ABCABCABCABC . . . ,” etc.

[0437] The type of modifications contained in the alternating motif may be the same or different. For example, if A, B, C, D each represent one type of modification on the nucleotide, the alternating pattern, i.e., modifications on every other nucleotide, may be the same, but each of the sense strand or antisense strand can be selected from several possibilities of modifications within the alternating motif such as “ABABAB . . . ”, “ACACAC . . . ” “BDBDBD . . . ” or “CDCDCD . . . ,” etc.

[0438] In some embodiments, the dsRNA molecule of the disclosure comprises the modification pattern for the alternating motif on the sense strand relative to the modification pattern for the alternating motif on the antisense strand is shifted. The shift may be such that the modified group of nucleotides of the sense strand corresponds to a differently modified group of nucleotides of the antisense strand and vice versa. For example, the sense strand when paired with the antisense strand in the dsRNA duplex, the alternating motif in the sense strand may start with “ABABAB” from 5′-3′ of the strand and the alternating motif in the antisense strand may start with “BABABA” from 3′-5′ of the strand within the duplex region. As another example, the alternating motif in the sense strand may start with “AABBAABB” from 5′-3′ of the strand and the alternating motif in the antisense strand may start with “BBAABBAA” from 3′-5′ of the strand within the duplex region, so that there is a complete or partial shift of the modification patterns between the sense strand and the antisense strand.

[0439] The dsRNA molecule of the disclosure may further comprise at least one phosphorothioate or methylphosphonate internucleotide linkage. The phosphorothioate or methylphosphonate internucleotide linkage modification may occur on any nucleotide of the sense strand or antisense strand or both in any position of the strand. For instance, the internucleotide linkage modification may occur on every nucleotide on the sense strand or antisense strand; each internucleotide linkage modification may occur in an alternating pattern on the sense strand or antisense strand; or the sense strand or antisense strand comprises both internucleotide linkage modifications in an alternating pattern. The alternating pattern of the internucleotide linkage modification on the sense strand may be the same or different from the antisense strand, and the alternating pattern of the internucleotide linkage modification on the sense strand may have a shift relative to the alternating pattern of the internucleotide linkage modification on the antisense strand.

[0440] In some embodiments, the dsRNA molecule comprises the phosphorothioate or methylphosphonate internucleotide linkage modification in the overhang region. For example, the overhang region comprises two nucleotides having a phosphorothioate or methylphosphonate internucleotide linkage between the two nucleotides. Internucleotide linkage modifications also may be made to link the overhang nucleotides with the terminal paired nucleotides within duplex region. For example, at least 2, 3, 4, or all the overhang nucleotides may be linked through phosphorothioate or methylphosphonate internucleotide linkage, and optionally, there may be additional phosphorothioate or methylphosphonate internucleotide linkages linking the overhang nucleotide with a paired nucleotide that is next to the overhang nucleotide. For instance, there may be at least two phosphorothioate internucleotide linkages between the terminal three nucleotides, in which two of the three nucleotides are overhang nucleotides, and the third is a paired nucleotide next to the overhang nucleotide. Preferably, these terminal three nucleotides may be at the 3′-end of the antisense strand.

[0441] In some embodiments, the sense strand of the dsRNA molecule comprises 1-10 blocks of two to ten phosphorothioate or methylphosphonate internucleotide linkages separated by 1, 2, 3, 4, 5, 6, 7, 8, 9, 10, 11, 12, 13, 14, 15, or 16 phosphate internucleotide linkages, wherein one of the phosphorothioate or methylphosphonate internucleotide linkages is placed at any position in the oligonucleotide sequence and the said sense strand is paired with an antisense strand comprising any combination of phosphorothioate, methylphosphonate and phosphate internucleotide linkages or an antisense strand comprising either phosphorothioate or methylphosphonate or phosphate linkage.

[0442] In some embodiments, the antisense strand of the dsRNA molecule comprises two blocks of two phosphorothioate or methylphosphonate internucleotide linkages separated by 1, 2, 3, 4, 5, 6, 7, 8, 9, 10, 11, 12, 13, 14, 15, 16, 17, or 18 phosphate internucleotide linkages, wherein one of the phosphorothioate or methylphosphonate internucleotide linkages is placed at any position in the oligonucleotide sequence and the said antisense strand is paired with a sense strand comprising any combination of phosphorothioate, methylphosphonate and phosphate internucleotide linkages or an antisense strand comprising either phosphorothioate or methylphosphonate or phosphate linkage.

[0443] In some embodiments, the antisense strand of the dsRNA molecule comprises two blocks of three phosphorothioate or methylphosphonate internucleotide linkages separated by 1, 2, 3, 4, 5, 6, 7, 8, 9, 10, 11, 12, 13, 14, 15, or 16 phosphate internucleotide linkages, wherein one of the phosphorothioate or methylphosphonate internucleotide linkages is placed at any position in the oligonucleotide sequence and the said antisense strand is paired with a sense strand comprising any combination of phosphorothioate, methylphosphonate and phosphate internucleotide linkages or an antisense strand comprising either phosphorothioate or methylphosphonate or phosphate linkage.

[0444] In some embodiments, the antisense strand of the dsRNA molecule comprises two blocks of four phosphorothioate or methylphosphonate internucleotide linkages separated by 1, 2, 3, 4, 5, 6, 7, 8, 9, 10, 11, 12, 13, or 14 phosphate internucleotide linkages, wherein one of the phosphorothioate or methylphosphonate internucleotide linkages is placed at any position in the oligonucleotide sequence and the said antisense strand is paired with a sense strand comprising any combination of phosphorothioate, methylphosphonate and phosphate internucleotide linkages or an antisense strand comprising either phosphorothioate or methylphosphonate or phosphate linkage.

[0445] In some embodiments, the antisense strand of the dsRNA molecule comprises two blocks of five phosphorothioate or methylphosphonate internucleotide linkages separated by 1, 2, 3, 4, 5, 6, 7, 8, 9, 10, 11, or 12 phosphate internucleotide linkages, wherein one of the phosphorothioate or methylphosphonate internucleotide linkages is placed at any position in the oligonucleotide sequence and the said antisense strand is paired with a sense strand comprising any combination of phosphorothioate, methylphosphonate and phosphate internucleotide linkages or an antisense strand comprising either phosphorothioate or methylphosphonate or phosphate linkage.

[0446] In some embodiments, the antisense strand of the dsRNA molecule comprises two blocks of six phosphorothioate or methylphosphonate internucleotide linkages separated by 1, 2, 3, 4, 5, 6, 7, 8, 9, or 10 phosphate internucleotide linkages, wherein one of the phosphorothioate or methylphosphonate internucleotide linkages is placed at any position in the oligonucleotide sequence and the said antisense strand is paired with a sense strand comprising any combination of phosphorothioate, methylphosphonate and phosphate internucleotide linkages or an antisense strand comprising either phosphorothioate or methylphosphonate or phosphate linkage.

[0447] In some embodiments, the antisense strand of the dsRNA molecule comprises two blocks of seven phosphorothioate or methylphosphonate internucleotide linkages separated by 1, 2, 3, 4, 5, 6, 7, or 8 phosphate internucleotide linkages, wherein one of the phosphorothioate or methylphosphonate internucleotide linkages is placed at any position in the oligonucleotide sequence and the said antisense strand is paired with a sense strand comprising any combination of phosphorothioate, methylphosphonate and phosphate internucleotide linkages or an antisense strand comprising either phosphorothioate or methylphosphonate or phosphate linkage.

[0448] In some embodiments, the antisense strand of the dsRNA molecule comprises two blocks of eight phosphorothioate or methylphosphonate internucleotide linkages separated by 1, 2, 3, 4, 5, or 6 phosphate internucleotide linkages, wherein one of the phosphorothioate or methylphosphonate internucleotide linkages is placed at any position in the oligonucleotide sequence and the said antisense strand is paired with a sense strand comprising any combination of phosphorothioate, methylphosphonate and phosphate internucleotide linkages or an antisense strand comprising either phosphorothioate or methylphosphonate or phosphate linkage.

[0449] In some embodiments, the antisense strand of the dsRNA molecule comprises two blocks of nine phosphorothioate or methylphosphonate internucleotide linkages separated by 1, 2, 3, or 4 phosphate internucleotide linkages, wherein one of the phosphorothioate or methylphosphonate internucleotide linkages is placed at any position in the oligonucleotide sequence and the said antisense strand is paired with a sense strand comprising any combination of phosphorothioate, methylphosphonate and phosphate internucleotide linkages or an antisense strand comprising either phosphorothioate or methylphosphonate or phosphate linkage.

[0450] In some embodiments, the dsRNA molecule of the disclosure further comprises one or more phosphorothioate or methylphosphonate internucleotide linkage modification within 1-10 of the termini position(s) of the sense or antisense strand. For example, at least 2, 3, 4, 5, 6, 7, 8, 9, or 10 nucleotides may be linked through phosphorothioate or methylphosphonate internucleotide linkage at one end or both ends of the sense or antisense strand.

[0451] In some embodiments, the dsRNA molecule of the disclosure further comprises one or more phosphorothioate or methylphosphonate internucleotide linkage modification within 1-10 of the internal region of the duplex of each of the sense or antisense strand. For example, at least 2, 3, 4, 5, 6, 7, 8, 9, or 10 nucleotides may be linked through phosphorothioate methylphosphonate internucleotide linkage at position 8-16 of the duplex region counting from the 5′-end of the sense strand; the dsRNA molecule can optionally further comprise one or more phosphorothioate or methylphosphonate internucleotide linkage modification within 1-10 of the termini position(s).

[0452] In some embodiments, the dsRNA molecule of the disclosure further comprises one to five phosphorothioate or methylphosphonate internucleotide linkage modification(s) within position 1-5 and one to five phosphorothioate or methylphosphonate internucleotide linkage modification(s) within position 18-23 of the sense strand (counting from the 5′-end), and one to five phosphorothioate or methylphosphonate internucleotide linkage modifications at positions 1 and 2 and one to five within positions 18-23 of the antisense strand (counting from the 5′-end).

[0453] In some embodiments, the dsRNA molecule of the disclosure further comprises one phosphorothioate internucleotide linkage modification within position 1-5 and one phosphorothioate or methylphosphonate internucleotide linkage modification within position 18-23 of the sense strand (counting from the 5′-end), and one phosphorothioate internucleotide linkage modification at position 1 or 2 and two phosphorothioate or methylphosphonate internucleotide linkage modifications within positions 18-23 of the antisense strand (counting from the 5′-end).

[0454] In some embodiments, the dsRNA molecule of the disclosure further comprises two phosphorothioate internucleotide linkage modifications within position 1-5 and one phosphorothioate internucleotide linkage modification within position 18-23 of the sense strand (counting from the 5′-end), and one phosphorothioate internucleotide linkage modification at position 1 or 2 and two phosphorothioate internucleotide linkage modifications within positions 18-23 of the antisense strand (counting from the 5′-end).

[0455] In some embodiments, the dsRNA molecule of the disclosure further comprises two phosphorothioate internucleotide linkage modifications within position 1-5 and two phosphorothioate internucleotide linkage modifications within position 18-23 of the sense strand (counting from the 5′-end), and one phosphorothioate internucleotide linkage modification at position 1 or 2 and two phosphorothioate internucleotide linkage modifications within positions 18-23 of the antisense strand (counting from the 5′-end).

[0456] In some embodiments, the dsRNA molecule of the disclosure further comprises two phosphorothioate internucleotide linkage modifications within position 1-5 and two phosphorothioate internucleotide linkage modifications within position 18-23 of the sense strand (counting from the 5′-end), and one phosphorothioate internucleotide linkage modification at position 1 or 2 and one phosphorothioate internucleotide linkage modification within positions 18-23 of the antisense strand (counting from the 5′-end).

[0457] In some embodiments, the dsRNA molecule of the disclosure further comprises one phosphorothioate internucleotide linkage modification within position 1-5 and one phosphorothioate internucleotide linkage modification within position 18-23 of the sense strand (counting from the 5′-end), and two phosphorothioate internucleotide linkage modifications at positions 1 and 2 and two phosphorothioate internucleotide linkage modifications within positions 18-23 of the antisense strand (counting from the 5′-end).

[0458] In some embodiments, the dsRNA molecule of the disclosure further comprises one phosphorothioate internucleotide linkage modification within position 1-5 and one within position 18-23 of the sense strand (counting from the 5′-end), and two phosphorothioate internucleotide linkage modifications at positions 1 and 2 and one phosphorothioate internucleotide linkage modification within positions 18-23 of the antisense strand (counting from the 5′-end).

[0459] In some embodiments, the dsRNA molecule of the disclosure further comprises one phosphorothioate internucleotide linkage modification within position 1-5 (counting from the 5′-end) of the sense strand, and two phosphorothioate internucleotide linkage modifications at positions 1 and 2 and one phosphorothioate internucleotide linkage modification within positions 18-23 of the antisense strand (counting from the 5′-end).

[0460] In some embodiments, the dsRNA molecule of the disclosure further comprises two phosphorothioate internucleotide linkage modifications within position 1-5 (counting from the 5′-end) of the sense strand, and one phosphorothioate internucleotide linkage modification at position 1 or 2 and two phosphorothioate internucleotide linkage modifications within positions 18-23 of the antisense strand (counting from the 5′-end).

[0461] In some embodiments, the dsRNA molecule of the disclosure further comprises two phosphorothioate internucleotide linkage modifications within positions 1-5 and one within positions 18-23 of the sense strand (counting from the 5′-end), and two phosphorothioate internucleotide linkage modifications at positions 1 and 2 and one phosphorothioate internucleotide linkage modification within positions 18-23 of the antisense strand (counting from the 5′-end).

[0462] In some embodiments, the dsRNA molecule of the disclosure further comprises two phosphorothioate internucleotide linkage modifications within positions 1-5 and one phosphorothioate internucleotide linkage modification within positions 18-23 of the sense strand (counting from the 5′-end), and two phosphorothioate internucleotide linkage modifications at positions 1 and 2 and two phosphorothioate internucleotide linkage modifications within positions 18-23 of the antisense strand (counting from the 5′-end).

[0463] In some embodiments, the dsRNA molecule of the disclosure further comprises two phosphorothioate internucleotide linkage modifications within positions 1-5 and one phosphorothioate internucleotide linkage modification within positions 18-23 of the sense strand (counting from the 5′-end), and one phosphorothioate internucleotide linkage modification at position 1 or 2 and two phosphorothioate internucleotide linkage modifications within positions 18-23 of the antisense strand (counting from the 5′-end).

[0464] In some embodiments, the dsRNA molecule of the disclosure further comprises two phosphorothioate internucleotide linkage modifications at position 1 and 2, and two phosphorothioate internucleotide linkage modifications at positions 20 and 21 of the sense strand (counting from the 5′-end), and one phosphorothioate internucleotide linkage modification at position 1 and one at position 21 of the antisense strand (counting from the 5′-end).

[0465] In some embodiments, the dsRNA molecule of the disclosure further comprises one phosphorothioate internucleotide linkage modification at position 1, and one phosphorothioate internucleotide linkage modification at position 21 of the sense strand (counting from the 5′-end), and two phosphorothioate internucleotide linkage modifications at positions 1 and 2 and two phosphorothioate internucleotide linkage modifications at positions 20 and 21 the antisense strand (counting from the 5′-end).

[0466] In some embodiments, the dsRNA molecule of the disclosure further comprises two phosphorothioate internucleotide linkage modifications at position 1 and 2, and two phosphorothioate internucleotide linkage modifications at position 21 and 22 of the sense strand (counting from the 5′-end), and one phosphorothioate internucleotide linkage modification at positions 1 and one phosphorothioate internucleotide linkage modification at position 21 of the antisense strand (counting from the 5′-end).

[0467] In some embodiments, the dsRNA molecule of the disclosure further comprises one phosphorothioate internucleotide linkage modification at position 1, and one phosphorothioate internucleotide linkage modification at position 21 of the sense strand (counting from the 5′-end), and two phosphorothioate internucleotide linkage modifications at positions 1 and 2 and two phosphorothioate internucleotide linkage modifications at positions 21 and 22 the antisense strand (counting from the 5′-end).

[0468] In some embodiments, the dsRNA molecule of the disclosure further comprises two phosphorothioate internucleotide linkage modifications at positions 1 and 2, and two phosphorothioate internucleotide linkage modifications at position 22 and 23 of the sense strand (counting from the 5′-end), and one phosphorothioate internucleotide linkage modification at position 1 and one phosphorothioate internucleotide linkage modification at position 21 of the antisense strand (counting from the 5′-end).

[0469] In some embodiments, the dsRNA molecule of the disclosure further comprises one phosphorothioate internucleotide linkage modification at position 1, and one phosphorothioate internucleotide linkage modification at position 21 of the sense strand (counting from the 5′-end), and two phosphorothioate internucleotide linkage modifications at positions 1 and 2 and two phosphorothioate internucleotide linkage modifications at positions 23 and 23 the antisense strand (counting from the 5′-end).

[0470] In some embodiments, compound of the disclosure comprises a pattern of backbone chiral centers. In some embodiments, a common pattern of backbone chiral centers comprises at least 5 internucleotidic linkages in the Sp configuration. In some embodiments, a common pattern of backbone chiral centers comprises at least 6 internucleotidic linkages in the Sp configuration. In some embodiments, a common pattern of backbone chiral centers comprises at least 7 internucleotidic linkages in the Sp configuration. In some embodiments, a common pattern of backbone chiral centers comprises at least 8 internucleotidic linkages in the Sp configuration. In some embodiments, a common pattern of backbone chiral centers comprises at least 9 internucleotidic linkages in the Sp configuration. In some embodiments, a common pattern of backbone chiral centers comprises at least 10 internucleotidic linkages in the Sp configuration. In some embodiments, a common pattern of backbone chiral centers comprises at least 11 internucleotidic linkages in the Sp configuration. In some embodiments, a common pattern of backbone chiral centers comprises at least 12 internucleotidic linkages in the Sp configuration. In some embodiments, a common pattern of backbone chiral centers comprises at least 13 internucleotidic linkages in the Sp configuration. In some embodiments, a common pattern of backbone chiral centers comprises at least 14 internucleotidic linkages in the Sp configuration. In some embodiments, a common pattern of backbone chiral centers comprises at least 15 internucleotidic linkages in the Sp configuration. In some embodiments, a common pattern of backbone chiral centers comprises at least 16 internucleotidic linkages in the Sp configuration. In some embodiments, a common pattern of backbone chiral centers comprises at least 17 internucleotidic linkages in the Sp configuration. In some embodiments, a common pattern of backbone chiral centers comprises at least 18 internucleotidic linkages in the Sp configuration. In some embodiments, a common pattern of backbone chiral centers comprises at least 19 internucleotidic linkages in the Sp configuration. In some embodiments, a common pattern of backbone chiral centers comprises no more than 8 internucleotidic linkages in the Rp configuration. In some embodiments, a common pattern of backbone chiral centers comprises no more than 7 internucleotidic linkages in the Rp configuration. In some embodiments, a common pattern of backbone chiral centers comprises no more than 6 internucleotidic linkages in the Rp configuration. In some embodiments, a common pattern of backbone chiral centers comprises no more than 5 internucleotidic linkages in the Rp configuration. In some embodiments, a common pattern of backbone chiral centers comprises no more than 4 internucleotidic linkages in the Rp configuration. In some embodiments, a common pattern of backbone chiral centers comprises no more than 3 internucleotidic linkages in the Rp configuration. In some embodiments, a common pattern of backbone chiral centers comprises no more than 2 internucleotidic linkages in the Rp configuration. In some embodiments, a common pattern of backbone chiral centers comprises no more than 1 internucleotidic linkages in the Rp configuration. In some embodiments, a common pattern of backbone chiral centers comprises no more than 8 internucleotidic linkages which are not chiral (as a non-limiting example, a phosphodiester). In some embodiments, a common pattern of backbone chiral centers comprises no more than 7 internucleotidic linkages which are not chiral. In some embodiments, a common pattern of backbone chiral centers comprises no more than 6 internucleotidic linkages which are not chiral. In some embodiments, a common pattern of backbone chiral centers comprises no more than 5 internucleotidic linkages which are not chiral. In some embodiments, a common pattern of backbone chiral centers comprises no more than 4 internucleotidic linkages which are not chiral. In some embodiments, a common pattern of backbone chiral centers comprises no more than 3 internucleotidic linkages which are not chiral. In some embodiments, a common pattern of backbone chiral centers comprises no more than 2 internucleotidic linkages which are not chiral. In some embodiments, a common pattern of backbone chiral centers comprises no more than 1 internucleotidic linkages which are not chiral. In some embodiments, a common pattern of backbone chiral centers comprises at least 10 internucleotidic linkages in the Sp configuration, and no more than 8 internucleotidic linkages which are not chiral. In some embodiments, a common pattern of backbone chiral centers comprises at least 11 internucleotidic linkages in the Sp configuration, and no more than 7 internucleotidic linkages which are not chiral. In some embodiments, a common pattern of backbone chiral centers comprises at least 12 internucleotidic linkages in the Sp configuration, and no more than 6 internucleotidic linkages which are not chiral. In some embodiments, a common pattern of backbone chiral centers comprises at least 13 internucleotidic linkages in the Sp configuration, and no more than 6 internucleotidic linkages which are not chiral. In some embodiments, a common pattern of backbone chiral centers comprises at least 14 internucleotidic linkages in the Sp configuration, and no more than 5 internucleotidic linkages which are not chiral. In some embodiments, a common pattern of backbone chiral centers comprises at least 15 internucleotidic linkages in the Sp configuration, and no more than 4 internucleotidic linkages which are not chiral. In some embodiments, the internucleotidic linkages in the Sp configuration are optionally contiguous or not contiguous. In some embodiments, the internucleotidic linkages in the Rp configuration are optionally contiguous or not contiguous. In some embodiments, the internucleotidic linkages which are not chiral are optionally contiguous or not contiguous.

[0471] In some embodiments, compound of the disclosure comprises a block is a stereochemistry block. In some embodiments, a block is an Rp block in that each internucleotidic linkage of the block is Rp. In some embodiments, a 5′-block is an Rp block. In some embodiments, a 3′-block is an Rp block. In some embodiments, a block is an Sp block in that each internucleotidic linkage of the block is Sp. In some embodiments, a 5′-block is an Sp block. In some embodiments, a 3′-block is an Sp block. In some embodiments, provided oligonucleotides comprise both Rp and Sp blocks. In some embodiments, provided oligonucleotides comprise one or more Rp but no Sp blocks. In some embodiments, provided oligonucleotides comprise one or more Sp but no Rp blocks. In some embodiments, provided oligonucleotides comprise one or more PO blocks wherein each internucleotidic linkage in a natural phosphate linkage.

[0472] In some embodiments, compound of the disclosure comprises a 5′-block is an Sp block wherein each sugar moiety comprises a 2′-F modification. In some embodiments, a 5′-block is an Sp block wherein each of internucleotidic linkage is a modified internucleotidic linkage and each sugar moiety comprises a 2′-F modification. In some embodiments, a 5′-block is an Sp block wherein each of internucleotidic linkage is a phosphorothioate linkage and each sugar moiety comprises a 2′-F modification. In some embodiments, a 5′-block comprises 4 or more nucleoside units. In some embodiments, a 5′-block comprises 5 or more nucleoside units. In some embodiments, a 5′-block comprises 6 or more nucleoside units. In some embodiments, a 5′-block comprises 7 or more nucleoside units. In some embodiments, a 3′-block is an Sp block wherein each sugar moiety comprises a 2′-F modification. In some embodiments, a 3′-block is an Sp block wherein each of internucleotidic linkage is a modified internucleotidic linkage and each sugar moiety comprises a 2′-F modification. In some embodiments, a 3′-block is an Sp block wherein each of internucleotidic linkage is a phosphorothioate linkage and each sugar moiety comprises a 2′-F modification. In some embodiments, a 3′-block comprises 4 or more nucleoside units. In some embodiments, a 3′-block comprises 5 or more nucleoside units. In some embodiments, a 3′-block comprises 6 or more nucleoside units. In some embodiments, a 3′-block comprises 7 or more nucleoside units.

[0473] In some embodiments, compound of the disclosure comprises a type of nucleoside in a region or an oligonucleotide is followed by a specific type of internucleotidic linkage, e.g., natural phosphate linkage, modified internucleotidic linkage, Rp chiral internucleotidic linkage, Sp chiral internucleotidic linkage, etc. In some embodiments, A is followed by Sp. In some embodiments, A is followed by Rp. In some embodiments, A is followed by natural phosphate linkage (PO). In some embodiments, U is followed by Sp. In some embodiments, U is followed by Rp. In some embodiments, U is followed by natural phosphate linkage (PO). In some embodiments, C is followed by Sp. In some embodiments, C is followed by Rp. In some embodiments, C is followed by natural phosphate linkage (PO). In some embodiments, G is followed by Sp. In some embodiments, G is followed by Rp. In some embodiments, G is followed by natural phosphate linkage (PO). In some embodiments, C and U are followed by Sp. In some embodiments, C and U are followed by Rp. In some embodiments, C and U are followed by natural phosphate linkage (PO). In some embodiments, A and G are followed by Sp. In some embodiments, A and G are followed by Rp.

[0474] In some embodiments, the antisense strand comprises phosphorothioate internucleotide linkages between nucleotide positions 21 and 22, and between nucleotide positions 22 and 23, wherein the antisense strand contains at least one thermally destabilizing modification of the duplex located in the seed region of the antisense strand (i.e., at position 2-9 of the 5′-end of the antisense strand), and wherein the dsRNA optionally further has at least one (e.g., one, two, three, four, five, six, seven or all eight) of the following characteristics: (i) the antisense comprises 2, 3, 4, 5 or 6 2′-fluoro modifications; (ii) the antisense comprises 3, 4 or 5 phosphorothioate internucleotide linkages; (iii) the sense strand is conjugated with a ligand; (iv) the sense strand comprises 2, 3, 4 or 5 2′-fluoro modifications; (v) the sense strand comprises 1, 2, 3, 4 or 5 phosphorothioate internucleotide linkages; (vi) the dsRNA comprises at least four 2′-fluoro modifications; (vii) the dsRNA comprises a duplex region of 12-40 nucleotide pairs in length; and (viii) the dsRNA has a blunt end at 5′-end of the antisense strand.

[0475] In some embodiments, the antisense strand comprises phosphorothioate internucleotide linkages between nucleotide positions 1 and 2, between nucleotide positions 2 and 3, between nucleotide positions 21 and 22, and between nucleotide positions 22 and 23, wherein the antisense strand contains at least one thermally destabilizing modification of the duplex located in the seed region of the antisense strand (i.e., at position 2-9 of the 5′-end of the antisense strand), and wherein the dsRNA optionally further has at least one (e.g., one, two, three, four, five, six, seven or all eight) of the following characteristics: (i) the antisense comprises 2, 3, 4, 5 or 6 2′-fluoro modifications; (ii) the sense strand is conjugated with a ligand; (iii) the sense strand comprises 2, 3, 4 or 5 2′-fluoro modifications; (iv) the sense strand comprises 1, 2, 3, 4 or 5 phosphorothioate internucleotide linkages; (v) the dsRNA comprises at least four 2′-fluoro modifications; (vi) the dsRNA comprises a duplex region of 12-40 nucleotide pairs in length; (vii) the dsRNA comprises a duplex region of 12-40 nucleotide pairs in length; and (viii) the dsRNA has a blunt end at 5′-end of the antisense strand.

[0476] In some embodiments, the sense strand comprises phosphorothioate internucleotide linkages between nucleotide positions 1 and 2, and between nucleotide positions 2 and 3, wherein the antisense strand contains at least one thermally destabilizing modification of the duplex located in the seed region of the antisense strand (i.e., at position 2-9 of the 5′-end of the antisense strand), and wherein the dsRNA optionally further has at least one (e.g., one, two, three, four, five, six, seven or all eight) of the following characteristics: (i) the antisense comprises 2, 3, 4, 5 or 6 2′-fluoro modifications; (ii) the antisense comprises 1, 2, 3, 4 or 5 phosphorothioate internucleotide linkages; (iii) the sense strand is conjugated with a ligand; (iv) the sense strand comprises 2, 3, 4 or 5 2′-fluoro modifications; (v) the sense strand comprises 3, 4 or 5 phosphorothioate internucleotide linkages; (vi) the dsRNA comprises at least four 2′-fluoro modifications; (vii) the dsRNA comprises a duplex region of 12-40 nucleotide pairs in length; and (viii) the dsRNA has a blunt end at 5′-end of the antisense strand.

[0477] In some embodiments, the sense strand comprises phosphorothioate internucleotide linkages between nucleotide positions 1 and 2, and between nucleotide positions 2 and 3, the antisense strand comprises phosphorothioate internucleotide linkages between nucleotide positions 1 and 2, between nucleotide positions 2 and 3, between nucleotide positions 21 and 22, and between nucleotide positions 22 and 23, wherein the antisense strand contains at least one thermally destabilizing modification of the duplex located in the seed region of the antisense strand (i.e., at position 2-9 of the 5′-end of the antisense strand), and wherein the dsRNA optionally further has at least one (e.g., one, two, three, four, five, six or all seven) of the following characteristics: (i) the antisense comprises 2, 3, 4, 5 or 6 2′-fluoro modifications; (ii) the sense strand is conjugated with a ligand; (iii) the sense strand comprises 2, 3, 4 or 5 2′-fluoro modifications; (iv) the sense strand comprises 3, 4 or 5 phosphorothioate internucleotide linkages; (v) the dsRNA comprises at least four 2′-fluoro modifications; (vi) the dsRNA comprises a duplex region of 12-40 nucleotide pairs in length; and (vii) the dsRNA has a blunt end at 5′-end of the antisense strand.

[0478] In some embodiments, the dsRNA molecule of the disclosure comprises mismatch(es) with the target, within the duplex, or combinations thereof. The mismatch can occur in the overhang region or the duplex region. The base pair can be ranked on the basis of their propensity to promote dissociation or melting (e.g., on the free energy of association or dissociation of a particular pairing, the simplest approach is to examine the pairs on an individual pair basis, though next neighbor or similar analysis can also be used). In terms of promoting dissociation: A:U is preferred over G:C; G:U is preferred over G:C; and I:C is preferred over G:C (I=inosine). Mismatches, e.g., non-canonical or other than canonical pairings (as described elsewhere herein) are preferred over canonical (A:T, A:U, G:C) pairings; and pairings which include a universal base are preferred over canonical pairings.

[0479] In some embodiments, the dsRNA molecule of the disclosure comprises at least one of the first 1, 2, 3, 4, or 5 base pairs within the duplex regions from the 5′-end of the antisense strand can be chosen independently from the group of: A:U, G:U, I:C, and mismatched pairs, e.g., non-canonical or other than canonical pairings or pairings which include a universal base, to promote the dissociation of the antisense strand at the 5′-end of the duplex.

[0480] In some embodiments, the nucleotide at the 1 position within the duplex region from the 5′-end in the antisense strand is selected from the group consisting of A, dA, dU, U, and dT. Alternatively, at least one of the first 1, 2 or 3 base pair within the duplex region from the 5′-end of the antisense strand is an AU base pair. For example, the first base pair within the duplex region from the 5′-end of the antisense strand is an AU base pair.

[0481] It was found that introducing 4′-modified or 5′-modified nucleotide to the 3′-end of a phosphodiester (PO), phosphorothioate (PS), or phosphorodithioate (PS2) linkage of a dinucleotide at any position of single stranded or double stranded oligonucleotide can exert steric effect to the internucleotide linkage and, hence, protecting or stabilizing it against nucleases. In some embodiments, the introduction of a 4′-modified or a 5′-modified nucleotide to the 3′-end of a PO, PS, or PS2 linkage of a dinucleotide modifies the second nucleotide in the dinucleotide pair. In other embodiments, the introduction of a 4′-modified or a 5′-modified nucleotide to the 3′-end of a PO, PS, or PS2 linkage of a dinucleotide modifies the nucleotide at the 3′-end of the dinucleotide pair.

[0482] In some embodiments, 5′-modified nucleotide is introduced at the 3′-end of a dinucleotide at any position of single stranded or double stranded siRNA. For instance, a 5′-alkylated nucleoside may be introduced at the 3′-end of a dinucleotide at any position of single stranded or double stranded siRNA. The alkyl group at the 5′ position of the ribose sugar can be racemic or chirally pure R or S isomer. An exemplary 5′-alkylated nucleotide is 5′-methyl nucleoside. The 5′-methyl can be either racemic or chirally pure R or S isomer.

[0483] In some embodiments, 4′-modified nucleotide is introduced at the 3′-end of a dinucleotide at any position of single stranded or double stranded siRNA. For instance, a 4′-alkylated nucleoside may be introduced at the 3′-end of a dinucleotide at any position of single stranded or double stranded siRNA. The alkyl group at the 4′ position of the ribose sugar can be racemic or chirally pure R or S isomer. An exemplary 4′-alkylated nucleotide is 4′-methyl nucleoside. The 4′-methyl can be either racemic or chirally pure R or S isomer. Alternatively, a 4′-O-alkylated nucleoside may be introduced at the 3′-end of a dinucleotide at any position of single stranded or double stranded siRNA. The 4′-O-alkyl of the ribose sugar can be racemic or chirally pure R or S isomer. An exemplary 4′-O-alkylated nucleotide is 4′-O-methyl nucleoside. The 4′-O-methyl can be either racemic or chirally pure R or S isomer.

[0484] In some embodiments, 5′-alkylated nucleotide is introduced at any position on the sense strand or antisense strand of a dsRNA, and such modification maintains or improves potency of the dsRNA. The 5′-alkyl can be either racemic or chirally pure R or S isomer. An exemplary 5′-alkylated nucleotide is 5′-methyl nucleoside. The 5′-methyl can be either racemic or chirally pure R or S isomer.

[0485] In some embodiments, 4′-alkylated nucleotide is introduced at any position on the sense strand or antisense strand of a dsRNA, and such modification maintains or improves potency of the dsRNA. The 4′-alkyl can be either racemic or chirally pure R or S isomer. An exemplary 4′-alkylated nucleotide is 4′-methyl nucleoside. The 4′-methyl can be either racemic or chirally pure R or S isomer.

[0486] In some embodiments, 4′-O-alkylated nucleotide is introduced at any position on the sense strand or antisense strand of a dsRNA, and such modification maintains or improves potency of the dsRNA. The 5′-alkyl can be either racemic or chirally pure R or S isomer. An exemplary 4′-O-alkylated nucleotide is 4′-O-methyl nucleoside. The 4′-O-methyl can be either racemic or chirally pure R or S isomer.

[0487] In some embodiments, the dsRNA molecule of the disclosure can comprise 2′-5′ linkages (with 2′-H, 2′-OH and 2′-OMe and with P═O or P═S). For example, the 2′-5′ linkages modifications can be used to promote nuclease resistance or to inhibit binding of the sense to the antisense strand, or can be used at the 5′ end of the sense strand to avoid sense strand activation by RISC.

[0488] In another embodiment, the dsRNA molecule of the disclosure can comprise L sugars (e.g., L ribose, L-arabinose with 2′-H, 2′-OH and 2′-OMe). For example, these L sugars modifications can be used to promote nuclease resistance or to inhibit binding of the sense to the antisense strand, or can be used at the 5′ end of the sense strand to avoid sense strand activation by RISC.

[0489] Various publications describe multimeric siRNA which can all be used with the dsRNA of the disclosure. Such publications include WO2007/091269, U.S. Pat. No. 7,858,769, WO2010/141511, WO2007/117686, WO2009/014887, and WO2011/031520 which are hereby incorporated by their entirely.

[0490] As described in more detail below, the RNAi agent that contains conjugations of one or more carbohydrate moieties to an RNAi agent can optimize one or more properties of the RNAi agent. In many cases, the carbohydrate moiety will be attached to a modified subunit of the RNAi agent. For example, the ribose sugar of one or more ribonucleotide subunits of a dsRNA agent can be replaced with another moiety, e.g., a non-carbohydrate (preferably cyclic) carrier to which is attached a carbohydrate ligand. A ribonucleotide subunit in which the ribose sugar of the subunit has been so replaced is referred to herein as a ribose replacement modification subunit (RRMS). A cyclic carrier may be a carbocyclic ring system, i.e., all ring atoms are carbon atoms, or a heterocyclic ring system, i.e., one or more ring atoms may be a heteroatom, e.g., nitrogen, oxygen, sulfur. The cyclic carrier may be a monocyclic ring system, or may contain two or more rings, e.g. fused rings. The cyclic carrier may be a fully saturated ring system, or it may contain one or more double bonds.

[0491] The ligand may be attached to the polynucleotide via a carrier. The carriers include (i) at least one “backbone attachment point,” preferably two “backbone attachment points” and (ii) at least one “tethering attachment point.” A “backbone attachment point” as used herein refers to a functional group, e.g. a hydroxyl group, or generally, a bond available for, and that is suitable for incorporation of the carrier into the backbone, e.g., the phosphate, or modified phosphate, e.g., sulfur containing, backbone, of a ribonucleic acid. A “tethering attachment point” (TAP) in some embodiments refers to a constituent ring atom of the cyclic carrier, e.g., a carbon atom or a heteroatom (distinct from an atom which provides a backbone attachment point), that connects a selected moiety. The moiety can be, e.g., a carbohydrate, e.g. monosaccharide, disaccharide, trisaccharide, tetrasaccharide, oligosaccharide and polysaccharide. Optionally, the selected moiety is connected by an intervening tether to the cyclic carrier. Thus, the cyclic carrier will often include a functional group, e.g., an amino group, or generally, provide a bond, that is suitable for incorporation or tethering of another chemical entity, e.g., a ligand to the constituent ring.

[0492] The RNAi agents may be conjugated to a ligand via a carrier, wherein the carrier can be cyclic group or acyclic group; preferably, the cyclic group is selected from pyrrolidinyl, pyrazolinyl, pyrazolidinyl, imidazolinyl, imidazolidinyl, piperidinyl, piperazinyl, [1,3]dioxolane, oxazolidinyl, isoxazolidinyl, morpholinyl, thiazolidinyl, isothiazolidinyl, quinoxalinyl, pyridazinonyl, tetrahydrofuryl and decalin; preferably, the acyclic group is selected from serinol backbone or diethanolamine backbone.

[0493] In certain specific embodiments, the RNAi agent for use in the methods of the disclosure is an agent selected from the group of agents listed in any one of Tables 2-5, 9 or 10. These agents may further comprise a ligand.

### IV. iRNAs Conjugated to Ligands

[0494] Another modification of the RNA of an iRNA of the invention involves chemically linking to the iRNA one or more ligands, moieties or conjugates that enhance the activity, cellular distribution or cellular uptake of the iRNA, e.g., into a cell. Such moieties include but are not limited to lipid moieties such as a cholesterol moiety (Letsinger et al., Proc. Natl. Acid. Sci. USA, 1989, 86: 6553-6556), cholic acid (Manoharan et al., Biorg. Med. Chem. Let., 1994, 4:1053-1060), a thioether, e.g., beryl-S-tritylthiol (Manoharan et al., Ann. N.Y. Acad. Sci., 1992, 660:306-309; Manoharan et al., Biorg. Med. Chem. Let., 1993, 3:2765-2770), a thiocholesterol (Oberhauser et al., Nucl. Acids Res., 1992, 20:533-538), an aliphatic chain, e.g., dodecandiol or undecyl residues (Saison-Behmoaras et al., EMBO J, 1991, 10:1111-1118; Kabanov et al., FEBS Lett., 1990, 259:327-330; Svinarchuk et al., Biochimie, 1993, 75:49-54), a phospholipid, e.g., di-hexadecyl-rac-glycerol or triethyl-ammonium 1,2-di-O-hexadecyl-rac-glycero-3-phosphonate (Manoharan et al., Tetrahedron Lett., 1995, 36:3651-3654; Shea et al., Nucl. Acids Res., 1990, 18:3777-3783), a polyamine or a polyethylene glycol chain (Manoharan et al., Nucleosides & Nucleotides, 1995, 14:969-973), or adamantane acetic acid (Manoharan et al., Tetrahedron Lett., 1995, 36:3651-3654), a palmityl moiety (Mishra et al., Biochim. Biophys. Acta, 1995, 1264:229-237), or an octadecylamine or hexylamino-carbonyloxycholesterol moiety (Crooke et al., J. Pharmacol. Exp. Ther., 1996, 277:923-937).

[0495] In certain embodiments, a ligand alters the distribution, targeting or lifetime of an iRNA agent into which it is incorporated. In some embodiments, a ligand provides an enhanced affinity for a selected target, e.g., molecule, cell or cell type, compartment, e.g., a cellular or organ compartment, tissue, organ or region of the body, as, e.g., compared to a species absent such a ligand. Typical ligands will not take part in duplex pairing in a duplexed nucleic acid.

[0496] Ligands can include a naturally occurring substance, such as a protein (e.g., human serum albumin (HSA), low-density lipoprotein (LDL), or globulin); carbohydrate (e.g., a dextran, pullulan, chitin, chitosan, inulin, cyclodextrin or hyaluronic acid); or a lipid. The ligand may also be a recombinant or synthetic molecule, such as a synthetic polymer, e.g., a synthetic polyamino acid. Examples of polyamino acids include polyamino acid is a polylysine (PLL), poly L-aspartic acid, poly L-glutamic acid, styrene-maleic acid anhydride copolymer, poly(L-lactide-co-glycolied) copolymer, divinyl ether-maleic anhydride copolymer, N-(2-hydroxypropyl) methacrylamide copolymer (HMPA), polyethylene glycol (PEG), polyvinyl alcohol (PVA), polyurethane, poly (2-ethylacryllic acid), N-isopropylacrylamide polymers, or polyphosphazine. Example of polyamines include: polyethylenimine, polylysine (PLL), spermine, spermidine, polyamine, pseudopeptide-polyamine, peptidomimetic polyamine, dendrimer polyamine, arginine, amidine, protamine, cationic lipid, cationic porphyrin, quaternary salt of a polyamine, or an α helical peptide.

[0497] Ligands can also include targeting groups, e.g., a cell or tissue targeting agent, e.g., a lectin, glycoprotein, lipid or protein, e.g., an antibody, that binds to a specified cell type such as a kidney cell. A targeting group can be a thyrotropin, melanotropin, lectin, glycoprotein, surfactant protein A, Mucin carbohydrate, multivalent lactose, multivalent galactose, N-acetyl-galactosamine, N-acetyl-glucosamine multivalent mannose, multivalent fucose, glycosylated polyaminoacids, multivalent galactose, transferrin, bisphosphonate, polyglutamate, polyaspartate, a lipid, cholesterol, a steroid, bile acid, folate, vitamin B12, biotin, or an RGD peptide or RGD peptide mimetic. In certain embodiments, the ligand is a multivalent galactose, e.g., an N-acetyl-galactosamine.

[0498] Other examples of ligands include dyes, intercalating agents (e.g. acridines), cross-linkers (e.g. psoralene, mitomycin C), porphyrins (TPPC4, texaphyrin, Sapphyrin), polycyclic aromatic hydrocarbons (e.g., phenazine, dihydrophenazine), artificial endonucleases (e.g. EDTA), lipophilic molecules, e.g., cholesterol, cholic acid, adamantane acetic acid, 1-pyrene butyric acid, dihydrotestosterone, 1,3-Bis-O(hexadecyl)glycerol, geranyloxyhexyl group, hexadecylglycerol, borneol, menthol, 1,3-propanediol, heptadecyl group, palmitic acid, myristic acid, O₃-(oleoyl)lithocholic acid, O3-(oleoyl)cholenic acid, dimethoxytrityl, or phenoxazine) and peptide conjugates (e.g., antennapedia peptide, Tat peptide), alkylating agents, phosphate, amino, mercapto, PEG (e.g., PEG-40K), MPEG, [MPEG]₂, polyamino, alkyl, substituted alkyl, radiolabeled markers, enzymes, haptens (e.g. biotin), transport/absorption facilitators (e.g., aspirin, vitamin E, folic acid), synthetic ribonucleases (e.g., imidazole, bisimidazole, histamine, imidazole clusters, acridine-imidazole conjugates, Eu3+ complexes of tetraazamacrocycles), dinitrophenyl, HRP, or AP.

[0499] Ligands can be proteins, e.g., glycoproteins, or peptides, e.g., molecules having a specific affinity for a co-ligand, or antibodies e.g., an antibody, that binds to a specified cell type such as a cancer cell, endothelial cell, or bone cell. Ligands may also include hormones and hormone receptors. They can also include non-peptidic species, such as lipids, lectins, carbohydrates, vitamins, cofactors, multivalent lactose, multivalent galactose, N-acetyl-galactosamine, N-acetyl-glucosamine multivalent mannose, or multivalent fucose. The ligand can be, for example, a lipopolysaccharide, an activator of p38 MAP kinase, or an activator of NF-κB.

[0500] The ligand can be a substance, e.g., a drug, which can increase the uptake of the iRNA agent into the cell, for example, by disrupting the cell's cytoskeleton, e.g., by disrupting the cell's microtubules, microfilaments, or intermediate filaments. The drug can be, for example, taxon, vincristine, vinblastine, cytochalasin, nocodazole, japlakinolide, latrunculin A, phalloidin, swinholide A, indanocine, or myoservin.

[0501] In some embodiments, a ligand attached to an iRNA as described herein acts as a pharmacokinetic modulator (PK modulator). PK modulators include lipophiles, bile acids, steroids, phospholipid analogues, peptides, protein binding agents, PEG, vitamins etc. Exemplary PK modulators include, but are not limited to, cholesterol, fatty acids, cholic acid, lithocholic acid, dialkylglycerides, diacylglyceride, phospholipids, sphingolipids, naproxen, ibuprofen, vitamin E, biotin etc. Oligonucleotides that comprise a number of phosphorothioate linkages are also known to bind to serum protein, thus short oligonucleotides, e.g., oligonucleotides of about 5 bases, 10 bases, 15 bases or 20 bases, comprising multiple of phosphorothioate linkages in the backbone are also amenable to the present invention as ligands (e.g. as PK modulating ligands). In addition, aptamers that bind serum components (e.g. serum proteins) are also suitable for use as PK modulating ligands in the embodiments described herein.

[0502] Ligand-conjugated iRNAs of the invention may be synthesized by the use of an oligonucleotide that bears a pendant reactive functionality, such as that derived from the attachment of a linking molecule onto the oligonucleotide (described below). This reactive oligonucleotide may be reacted directly with commercially-available ligands, ligands that are synthesized bearing any of a variety of protecting groups, or ligands that have a linking moiety attached thereto.

[0503] The oligonucleotides used in the conjugates of the present invention may be conveniently and routinely made through the well-known technique of solid-phase synthesis. Equipment for such synthesis is sold by several vendors including, for example, Applied Biosystems® (Foster City, Calif.). Any other means for such synthesis known in the art may additionally or alternatively be employed. It is also known to use similar techniques to prepare other oligonucleotides, such as the phosphorothioates and alkylated derivatives.

[0504] In the ligand-conjugated oligonucleotides and ligand-molecule bearing sequence-specific linked nucleosides of the present invention, the oligonucleotides and oligonucleosides may be assembled on a suitable DNA synthesizer utilizing standard nucleotide or nucleoside precursors, or nucleotide or nucleoside conjugate precursors that already bear the linking moiety, ligand-nucleotide or nucleoside-conjugate precursors that already bear the ligand molecule, or non-nucleoside ligand-bearing building blocks.

[0505] When using nucleotide-conjugate precursors that already bear a linking moiety, the synthesis of the sequence-specific linked nucleosides is typically completed, and the ligand molecule is then reacted with the linking moiety to form the ligand-conjugated oligonucleotide. In some embodiments, the oligonucleotides or linked nucleosides of the present invention are synthesized by an automated synthesizer using phosphoramidites derived from ligand-nucleoside conjugates in addition to the standard phosphoramidites and non-standard phosphoramidites that are commercially available and routinely used in oligonucleotide synthesis.

[0506] A. Lipid Conjugates

[0507] In certain embodiments, the ligand or conjugate is a lipid or lipid-based molecule. Such a lipid or lipid-based molecule can typically bind a serum protein, such as human serum albumin (HSA). An HSA binding ligand allows for distribution of the conjugate to a target tissue, e.g., a non-kidney target tissue of the body. For example, the target tissue can be the liver, including parenchymal cells of the liver. Other molecules that can bind HSA can also be used as ligands. For example, naproxen or aspirin can be used. A lipid or lipid-based ligand can (a) increase resistance to degradation of the conjugate, (b) increase targeting or transport into a target cell or cell membrane, or (c) can be used to adjust binding to a serum protein, e.g., HSA.

[0508] A lipid-based ligand can be used to modulate, e.g., control (e.g., inhibit) the binding of the conjugate to a target tissue. For example, a lipid or lipid-based ligand that binds to HSA more strongly will be less likely to be targeted to the kidney and therefore less likely to be cleared from the body. A lipid or lipid-based ligand that binds to HSA less strongly can be used to target the conjugate to the kidney.

[0509] In certain embodiments, the lipid-based ligand binds HSA. For example, the ligand can bind HSA with a sufficient affinity such that distribution of the conjugate to a non-kidney tissue is enhanced. However, the affinity is typically not so strong that the HSA-ligand binding cannot be reversed.

[0510] In certain embodiments, the lipid-based ligand binds HSA weakly or not at all, such that distribution of the conjugate to the kidney is enhanced. Other moieties that target to kidney cells can also be used in place of or in addition to the lipid-based ligand.

[0511] In another aspect, the ligand is a moiety, e.g., a vitamin, which is taken up by a target cell, e.g., a proliferating cell. These are particularly useful for treating disorders characterized by unwanted cell proliferation, e.g., of the malignant or non-malignant type, e.g., cancer cells. Exemplary vitamins include vitamin A, E, and K. Other exemplary vitamins include are B vitamin, e.g., folic acid, B12, riboflavin, biotin, pyridoxal or other vitamins or nutrients taken up by cancer cells. Also included are HSA and low density lipoprotein (LDL).

[0512] B. Cell Permeation Agents

[0513] In another aspect, the ligand is a cell-permeation agent, such as a helical cell-permeation agent. In certain embodiments, the agent is amphipathic. An exemplary agent is a peptide such as tat or antennopedia. If the agent is a peptide, it can be modified, including a peptidylmimetic, invertomers, non-peptide or pseudo-peptide linkages, and use of D-amino acids. The helical agent is typically an α-helical agent and can have a lipophilic and a lipophobic phase.

[0514] The ligand can be a peptide or peptidomimetic. A peptidomimetic (also referred to herein as an oligopeptidomimetic) is a molecule capable of folding into a defined three-dimensional structure similar to a natural peptide. The attachment of peptide and peptidomimetics to iRNA agents can affect pharmacokinetic distribution of the iRNA, such as by enhancing cellular recognition and absorption. The peptide or peptidomimetic moiety can be about 5-50 amino acids long, e.g., about 5, 10, 15, 20, 25, 30, 35, 40, 45, or 50 amino acids long.

[0515] A peptide or peptidomimetic can be, for example, a cell permeation peptide, cationic peptide, amphipathic peptide, or hydrophobic peptide (e.g., consisting primarily of Tyr, Trp, or Phe). The peptide moiety can be a dendrimer peptide, constrained peptide or crosslinked peptide. In another alternative, the peptide moiety can include a hydrophobic membrane translocation sequence (MTS). An exemplary hydrophobic MTS-containing peptide is RFGF having the amino acid sequence AAVALLPAVLLALLAP (SEQ ID NO: 1534). An RFGF analogue (e.g., amino acid sequence AALLPVLLAAP (SEQ ID NO: 1535)) containing a hydrophobic MTS can also be a targeting moiety. The peptide moiety can be a “delivery” peptide, which can carry large polar molecules including peptides, oligonucleotides, and protein across cell membranes. For example, sequences from the HIV Tat protein (GRKKRRQRRRPPQ (SEQ ID NO: 1536)) and the Drosophila Antennapedia protein (RQIKIWFQNRRMKWKK (SEQ ID NO: 1537)) have been found to be capable of functioning as delivery peptides. A peptide or peptidomimetic can be encoded by a random sequence of DNA, such as a peptide identified from a phage-display library, or one-bead-one-compound (OBOC) combinatorial library (Lam et al., Nature, 354:82-84, 1991). Typically, the peptide or peptidomimetic tethered to a dsRNA agent via an incorporated monomer unit is a cell targeting peptide such as an arginine-glycine-aspartic acid (RGD)-peptide, or RGD mimic. A peptide moiety can range in length from about 5 amino acids to about 40 amino acids. The peptide moieties can have a structural modification, such as to increase stability or direct conformational properties. Any of the structural modifications described below can be utilized.

[0516] An RGD peptide for use in the compositions and methods of the invention may be linear or cyclic, and may be modified, e.g., glycosylated or methylated, to facilitate targeting to a specific tissue(s). RGD-containing peptides and peptidiomimemtics may include D-amino acids, as well as synthetic RGD mimics. In addition to RGD, one can use other moieties that target the integrin ligand. Preferred conjugates of this ligand target PECAM-1 or VEGF.

[0517] An RGD peptide moiety can be used to target a particular cell type, e.g., a tumor cell, such as an endothelial tumor cell or a breast cancer tumor cell (Zitzmann et al., Cancer Res., 62:5139-43, 2002). An RGD peptide can facilitate targeting of an dsRNA agent to tumors of a variety of other tissues, including the lung, kidney, spleen, or liver (Aoki et al., Cancer Gene Therapy 8:783-787, 2001). Typically, the RGD peptide will facilitate targeting of an iRNA agent to the kidney. The RGD peptide can be linear or cyclic, and can be modified, e.g., glycosylated or methylated to facilitate targeting to specific tissues. For example, a glycosylated RGD peptide can deliver an iRNA agent to a tumor cell expressing αvβ₃ (Haubner et al., Jour. Nucl. Med., 42:326-336, 2001).

[0518] A “cell permeation peptide” is capable of permeating a cell, e.g., a microbial cell, such as a bacterial or fungal cell, or a mammalian cell, such as a human cell. A microbial cell-permeating peptide can be, for example, an α-helical linear peptide (e.g., LL-37 or Ceropin P1), a disulfide bond-containing peptide (e.g., α-defensin, β-defensin or bactenecin), or a peptide containing only one or two dominating amino acids (e.g., PR-39 or indolicidin). A cell permeation peptide can also include a nuclear localization signal (NLS). For example, a cell permeation peptide can be a bipartite amphipathic peptide, such as MPG, which is derived from the fusion peptide domain of HIV-1 gp41 and the NLS of SV40 large T antigen (Simeoni et al., Nucl. Acids Res. 31:2717-2724, 2003).

[0519] C. Carbohydrate Conjugates

[0520] In some embodiments of the compositions and methods of the invention, an iRNA further comprises a carbohydrate. The carbohydrate conjugated iRNA are advantageous for the in vivo delivery of nucleic acids, as well as compositions suitable for in vivo therapeutic use, as described herein. As used herein, “carbohydrate” refers to a compound which is either a carbohydrate per se made up of one or more monosaccharide units having at least 6 carbon atoms (which can be linear, branched or cyclic) with an oxygen, nitrogen or sulfur atom bonded to each carbon atom; or a compound having as a part thereof a carbohydrate moiety made up of one or more monosaccharide units each having at least six carbon atoms (which can be linear, branched or cyclic), with an oxygen, nitrogen or sulfur atom bonded to each carbon atom. Representative carbohydrates include the sugars (mono-, di-, tri- and oligosaccharides containing from about 4, 5, 6, 7, 8, or 9 monosaccharide units), and polysaccharides such as starches, glycogen, cellulose and polysaccharide gums. Specific monosaccharides include C5 and above (e.g., C5, C6, C7, or C8) sugars; di- and tri-saccharides include sugars having two or three monosaccharide units (e.g., C5, C6, C7, or C8).

[0521] In certain embodiments, a carbohydrate conjugate comprises a monosaccharide.

[0522] In certain embodiments, the monosaccharide is an N-acetylgalactosamine (GalNAc). GalNAc conjugates, which comprise one or more N-acetylgalactosamine (GalNAc) derivatives, are described, for example, in U.S. Pat. No. 8,106,022, the entire content of which is hereby incorporated herein by reference. In some embodiments, the GalNAc conjugate serves as a ligand that targets the iRNA to particular cells. In some embodiments, the GalNAc conjugate targets the iRNA to liver cells, e.g., by serving as a ligand for the asialoglycoprotein receptor of liver cells (e.g., hepatocytes).

[0523] In some embodiments, the carbohydrate conjugate comprises one or more GalNAc derivatives. The GalNAc derivatives may be attached via a linker, e.g., a bivalent or trivalent branched linker. In some embodiments the GalNAc conjugate is conjugated to the 3′ end of the sense strand. In some embodiments, the GalNAc conjugate is conjugated to the iRNA agent (e.g., to the 3′ end of the sense strand) via a linker, e.g., a linker as described herein. In some embodiments the GalNAc conjugate is conjugated to the 5′ end of the sense strand. In some embodiments, the GalNAc conjugate is conjugated to the iRNA agent (e.g., to the 5′ end of the sense strand) via a linker, e.g., a linker as described herein.

[0524] In certain embodiments of the invention, the GalNAc or GalNAc derivative is attached to an iRNA agent of the invention via a monovalent linker. In some embodiments, the GalNAc or GalNAc derivative is attached to an iRNA agent of the invention via a bivalent linker. In yet other embodiments of the invention, the GalNAc or GalNAc derivative is attached to an iRNA agent of the invention via a trivalent linker. In other embodiments of the invention, the GalNAc or GalNAc derivative is attached to an iRNA agent of the invention via a tetravalent linker.

[0525] In certain embodiments, the double stranded RNAi agents of the invention comprise one GalNAc or GalNAc derivative attached to the iRNA agent. In certain embodiments, the double stranded RNAi agents of the invention comprise a plurality (e.g., 2, 3, 4, 5, or 6) GalNAc or GalNAc derivatives, each independently attached to a plurality of nucleotides of the double stranded RNAi agent through a plurality of monovalent linkers.

[0526] In some embodiments, for example, when the two strands of an iRNA agent of the invention are part of one larger molecule connected by an uninterrupted chain of nucleotides between the 3′-end of one strand and the 5′-end of the respective other strand forming a hairpin loop comprising, a plurality of unpaired nucleotides, each unpaired nucleotide within the hairpin loop may independently comprise a GalNAc or GalNAc derivative attached via a monovalent linker. The hairpin loop may also be formed by an extended overhang in one strand of the duplex.

[0527] In some embodiments, for example, when the two strands of an iRNA agent of the invention are part of one larger molecule connected by an uninterrupted chain of nucleotides between the 3′-end of one strand and the 5′-end of the respective other strand forming a hairpin loop comprising, a plurality of unpaired nucleotides, each unpaired nucleotide within the hairpin loop may independently comprise a GalNAc or GalNAc derivative attached via a monovalent linker. The hairpin loop may also be formed by an extended overhang in one strand of the duplex.

[0528] In some embodiments, the GalNAc conjugate is

[chemical structure]

[0529] In some embodiments, the RNAi agent is attached to the carbohydrate conjugate via a linker as shown in the following schematic, wherein X is O or S

[chemical structure]

[0530] In some embodiments, the RNAi agent is conjugated to L96 as defined in Table 1 and shown below:

[chemical structure]

[0531] In certain embodiments, a carbohydrate conjugate for use in the compositions and methods of the invention is selected from the group consisting of:

[chemical structure]

[chemical structure]

[chemical structure]

[chemical structure]

[chemical structure]

[chemical structure]

[chemical structure]

[chemical structure]

[0532] In certain embodiments, a carbohydrate conjugate for use in the compositions and methods of the invention is a monosaccharide. In certain embodiments, the monosaccharide is an N-acetylgalactosamine, such as

[chemical structure]

[0533] Another representative carbohydrate conjugate for use in the embodiments described herein includes, but is not limited to,

[chemical structure]

[0534] when one of X or Y is an oligonucleotide, the other is a hydrogen.

[0535] In some embodiments, a suitable ligand is a ligand disclosed in WO 2019/055633, the entire contents of which are incorporated herein by reference. In one embodiment the ligand comprises the structure below:

[chemical structure]

[0536] In certain embodiments, the RNAi agents of the disclosure may include GalNAc ligands, even if such GalNAc ligands are currently projected to be of limited value for the preferred intrathecal/CNS delivery route(s) of the instant disclosure.

[0537] In certain embodiments of the invention, the GalNAc or GalNAc derivative is attached to an iRNA agent of the invention via a monovalent linker. In some embodiments, the GalNAc or GalNAc derivative is attached to an iRNA agent of the invention via a bivalent linker. In yet other embodiments of the invention, the GalNAc or GalNAc derivative is attached to an iRNA agent of the invention via a trivalent linker.

[0538] In one embodiment, the double stranded RNAi agents of the invention comprise one or more GalNAc or GalNAc derivative attached to the iRNA agent. The GalNAc may be attached to any nucleotide via a linker on the sense strand or antsisense strand. The GalNac may be attached to the 5′-end of the sense strand, the 3′ end of the sense strand, the 5′-end of the antisense strand, or the 3′-end of the antisense strand. In one embodiment, the GalNAc is attached to the 3′ end of the sense strand, e.g., via a trivalent linker.

[0539] In other embodiments, the double stranded RNAi agents of the invention comprise a plurality (e.g., 2, 3, 4, 5, or 6) GalNAc or GalNAc derivatives, each independently attached to a plurality of nucleotides of the double stranded RNAi agent through a plurality of linkers, e.g., monovalent linkers.

[0540] In some embodiments, for example, when the two strands of an iRNA agent of the invention is part of one larger molecule connected by an uninterrupted chain of nucleotides between the 3′-end of one strand and the 5′-end of the respective other strand forming a hairpin loop comprising, a plurality of unpaired nucleotides, each unpaired nucleotide within the hairpin loop may independently comprise a GalNAc or GalNAc derivative attached via a monovalent linker.

[0541] In some embodiments, the carbohydrate conjugate further comprises one or more additional ligands as described above, such as, but not limited to, a PK modulator or a cell permeation peptide.

[0542] Additional carbohydrate conjugates and linkers suitable for use in the present invention include those described in WO 2014/179620 and WO 2014/179627, the entire contents of each of which are incorporated herein by reference.

[0543] D. Linkers

[0544] In some embodiments, the conjugate or ligand described herein can be attached to an iRNA oligonucleotide with various linkers that can be cleavable or non-cleavable.

[0545] The term “linker” or “linking group” means an organic moiety that connects two parts of a compound, e.g., covalently attaches two parts of a compound. Linkers typically comprise a direct bond or an atom such as oxygen or sulfur, a unit such as NR8, C(O), C(O)NH, SO, SO₂, SO₂NH or a chain of atoms, such as, but not limited to, substituted or unsubstituted alkyl, substituted or unsubstituted alkenyl, substituted or unsubstituted alkynyl, arylalkyl, arylalkenyl, arylalkynyl, heteroarylalkyl, heteroarylalkenyl, heteroarylalkynyl, heterocyclylalkyl, heterocyclylalkenyl, heterocyclylalkynyl, aryl, heteroaryl, heterocyclyl, cycloalkyl, cycloalkenyl, alkylarylalkyl, alkylarylalkenyl, alkylarylalkynyl, alkenylarylalkyl, alkenylarylalkenyl, alkenylarylalkynyl, alkynylarylalkyl, alkynylarylalkenyl, alkynylarylalkynyl, alkylheteroarylalkyl, alkylheteroarylalkenyl, alkylheteroarylalkynyl, alkenylheteroarylalkyl, alkenylheteroarylalkenyl, alkenylheteroarylalkynyl, alkynylheteroarylalkyl, alkynylheteroarylalkenyl, alkynylheteroarylalkynyl, alkylheterocyclylalkyl, alkylheterocyclylalkenyl, alkylhererocyclylalkynyl, alkenylheterocyclylalkyl, alkenylheterocyclylalkenyl, alkenylheterocyclylalkynyl, alkynylheterocyclylalkyl, alkynylheterocyclylalkenyl, alkynylheterocyclylalkynyl, alkylaryl, alkenylaryl, alkynylaryl, alkylheteroaryl, alkenylheteroaryl, alkynylhereroaryl, which one or more methylenes can be interrupted or terminated by O, S, S(O), SO₂, N(R8), C(O), substituted or unsubstituted aryl, substituted or unsubstituted heteroaryl, substituted or unsubstituted heterocyclic; where R8 is hydrogen, acyl, aliphatic or substituted aliphatic. In certain embodiments, the linker is between about 1-24 atoms, 2-24, 3-24, 4-24, 5-24, 6-24, 6-18, 7-18, 8-18 atoms, 7-17, 8-17, 6-16, 7-16, or 8-16 atoms.

[0546] A cleavable linking group is one which is sufficiently stable outside the cell, but which upon entry into a target cell is cleaved to release the two parts the linker is holding together. In a preferred embodiment, the cleavable linking group is cleaved at least about 10 times, 20, times, 30 times, 40 times, 50 times, 60 times, 70 times, 80 times, 90 times or more, or at least about 100 times faster in a target cell or under a first reference condition (which can, e.g., be selected to mimic or represent intracellular conditions) than in the blood of a subject, or under a second reference condition (which can, e.g., be selected to mimic or represent conditions found in the blood or serum).

[0547] Cleavable linking groups are susceptible to cleavage agents, e.g., pH, redox potential or the presence of degradative molecules. Generally, cleavage agents are more prevalent or found at higher levels or activities inside cells than in serum or blood. Examples of such degradative agents include: redox agents which are selected for particular substrates or which have no substrate specificity, including, e.g., oxidative or reductive enzymes or reductive agents such as mercaptans, present in cells, that can degrade a redox cleavable linking group by reduction; esterases; endosomes or agents that can create an acidic environment, e.g., those that result in a pH of five or lower; enzymes that can hydrolyze or degrade an acid cleavable linking group by acting as a general acid, peptidases (which can be substrate specific), and phosphatases.

[0548] A cleavable linkage group, such as a disulfide bond can be susceptible to pH. The pH of human serum is 7.4, while the average intracellular pH is slightly lower, ranging from about 7.1-7.3. Endosomes have a more acidic pH, in the range of 5.5-6.0, and lysosomes have an even more acidic pH at around 5.0. Some linkers will have a cleavable linking group that is cleaved at a preferred pH, thereby releasing a cationic lipid from the ligand inside the cell, or into the desired compartment of the cell.

[0549] A linker can include a cleavable linking group that is cleavable by a particular enzyme. The type of cleavable linking group incorporated into a linker can depend on the cell to be targeted. For example, a liver-targeting ligand can be linked to a cationic lipid through a linker that includes an ester group. Liver cells are rich in esterases, and therefore the linker will be cleaved more efficiently in liver cells than in cell types that are not esterase-rich. Other cell-types rich in esterases include cells of the lung, renal cortex, and testis.

[0550] Linkers that contain peptide bonds can be used when targeting cell types rich in peptidases, such as liver cells and synoviocytes.

[0551] In general, the suitability of a candidate cleavable linking group can be evaluated by testing the ability of a degradative agent (or condition) to cleave the candidate linking group. It will also be desirable to also test the candidate cleavable linking group for the ability to resist cleavage in the blood or when in contact with other non-target tissue. Thus, one can determine the relative susceptibility to cleavage between a first and a second condition, where the first is selected to be indicative of cleavage in a target cell and the second is selected to be indicative of cleavage in other tissues or biological fluids, e.g., blood or serum. The evaluations can be carried out in cell free systems, in cells, in cell culture, in organ or tissue culture, or in whole animals. It can be useful to make initial evaluations in cell-free or culture conditions and to confirm by further evaluations in whole animals. In preferred embodiments, useful candidate compounds are cleaved at least about 2, 4, 10, 20, 30, 40, 50, 60, 70, 80, 90, or about 100 times faster in the cell (or under in vitro conditions selected to mimic intracellular conditions) as compared to blood or serum (or under in vitro conditions selected to mimic extracellular conditions).

[0552] i. Redox Cleavable Linking Groups

[0553] In certain embodiments, a cleavable linking group is a redox cleavable linking group that is cleaved upon reduction or oxidation. An example of reductively cleavable linking group is a disulphide linking group (—S—S—). To determine if a candidate cleavable linking group is a suitable “reductively cleavable linking group,” or for example is suitable for use with a particular iRNA moiety and particular targeting agent one can look to methods described herein. For example, a candidate can be evaluated by incubation with dithiothreitol (DTT), or other reducing agent using reagents know in the art, which mimic the rate of cleavage which would be observed in a cell, e.g., a target cell. The candidates can also be evaluated under conditions which are selected to mimic blood or serum conditions. In one, candidate compounds are cleaved by at most about 10% in the blood. In other embodiments, useful candidate compounds are degraded at least about 2, 4, 10, 20, 30, 40, 50, 60, 70, 80, 90, or about 100 times faster in the cell (or under in vitro conditions selected to mimic intracellular conditions) as compared to blood (or under in vitro conditions selected to mimic extracellular conditions). The rate of cleavage of candidate compounds can be determined using standard enzyme kinetics assays under conditions chosen to mimic intracellular media and compared to conditions chosen to mimic extracellular media.

[0554] ii. Phosphate-Based Cleavable Linking Groups

[0555] In certain embodiments, a cleavable linker comprises a phosphate-based cleavable linking group. A phosphate-based cleavable linking group is cleaved by agents that degrade or hydrolyze the phosphate group. An example of an agent that cleaves phosphate groups in cells are enzymes such as phosphatases in cells. Examples of phosphate-based linking groups are —O—P(O)(ORk)-O—, —O—P(S)(ORk)-O—, —O—P(S)(SRk)-O—, —S—P(O)(ORk)-O—, —O—P(O)(ORk)-S—, —S—P(O)(ORk)-S—, —O—P(S)(ORk)-S—, —S—P(S)(ORk)-O—, —O—P(O)(Rk)-O—, —O—P(S)(Rk)-O—, —S—P(O)(Rk)-O—, —S—P(S)(Rk)-O—, —S—P(O)(Rk)-S—, —O—P(S)(Rk)-S—. Preferred embodiments are —O—P(O)(OH)—O—, —O—P(S)(OH)—O—, —O—P(S)(SH)—O—, —S—P(O)(OH)—O—, —O—P(O)(OH)—S—, —S—P(O)(OH)—S—, —O—P(S)(OH)—S—, —S—P(S)(OH)—O—, —O—P(O)(H)—O—, —O—P(S)(H)—O—, —S—P(O)(H)—O, —S—P(S)(H)—O—, —S—P(O)(H)—S—, —O—P(S)(H)—S—. A preferred embodiment is —O—P(O)(OH)—O—. These candidates can be evaluated using methods analogous to those described above.

[0556] iii. Acid Cleavable Linking Groups

[0557] In certain embodiments, a cleavable linker comprises an acid cleavable linking group. An acid cleavable linking group is a linking group that is cleaved under acidic conditions. In preferred embodiments acid cleavable linking groups are cleaved in an acidic environment with a pH of about 6.5 or lower (e.g., about 6.0, 5.75, 5.5, 5.25, 5.0, or lower), or by agents such as enzymes that can act as a general acid. In a cell, specific low pH organelles, such as endosomes and lysosomes can provide a cleaving environment for acid cleavable linking groups. Examples of acid cleavable linking groups include but are not limited to hydrazones, esters, and esters of amino acids. Acid cleavable groups can have the general formula —C═NN—, C(O)O, or —OC(O). A preferred embodiment is when the carbon attached to the oxygen of the ester (the alkoxy group) is an aryl group, substituted alkyl group, or tertiary alkyl group such as dimethyl pentyl or t-butyl. These candidates can be evaluated using methods analogous to those described above.

[0558] iv. Ester-Based Cleavable Linking Groups

[0559] In certain embodiments, a cleavable linker comprises an ester-based cleavable linking group. An ester-based cleavable linking group is cleaved by enzymes such as esterases and amidases in cells. Examples of ester-based cleavable linking groups include but are not limited to esters of alkylene, alkenylene and alkynylene groups. Ester cleavable linking groups have the general formula —C(O)O—, or —OC(O)—. These candidates can be evaluated using methods analogous to those described above.

[0560] v. Peptide-Based Cleavable Linking Groups

[0561] In yet another embodiment, a cleavable linker comprises a peptide-based cleavable linking group. A peptide-based cleavable linking group is cleaved by enzymes such as peptidases and proteases in cells. Peptide-based cleavable linking groups are peptide bonds formed between amino acids to yield oligopeptides (e.g., dipeptides, tripeptides etc.) and polypeptides. Peptide-based cleavable groups do not include the amide group (—C(O)NH—). The amide group can be formed between any alkylene, alkenylene or alkynelene. A peptide bond is a special type of amide bond formed between amino acids to yield peptides and proteins. The peptide based cleavage group is generally limited to the peptide bond (i.e., the amide bond) formed between amino acids yielding peptides and proteins and does not include the entire amide functional group. Peptide-based cleavable linking groups have the general formula —NHCHRAC(O)NHCHRBC(O)—, where RA and RB are the R groups of the two adjacent amino acids. These candidates can be evaluated using methods analogous to those described above.

[0562] In some embodiments, an iRNA of the invention is conjugated to a carbohydrate through a linker. Non-limiting examples of iRNA carbohydrate conjugates with linkers of the compositions and methods of the invention include, but are not limited to,

[chemical structure]

[chemical structure]

[chemical structure]

when one of X or Y is an oligonucleotide, the other is a hydrogen.

[0563] In certain embodiments of the compositions and methods of the invention, a ligand is one or more “GalNAc” (N-acetylgalactosamine) derivatives attached through a bivalent or trivalent branched linker.

[0564] In certain embodiments, a dsRNA of the invention is conjugated to a bivalent or trivalent branched linker selected from the group of structures shown in any of formula (XLV)-(XLVI):

[chemical structure]

[0565] wherein q2A, q2B, q3A, q3B, q4A, q4B, q5A, q5B and q5C represent independently for each occurrence 0-20 and wherein the repeating unit can be the same or different;

[0566] P^{2A}, P^{2B}, P^{3A}, P^{3B}, P^{4A}, P^{4B}, P^{5A}, P^{5B}, P^{5C}, T^{2A}, T^{2B}, T^{3A}, T^{3B}, T^{4A}, T^{4B}, T^{4A}, T^{5B}, T^{5C} are each independently for each occurrence absent, CO, NH, O, S, OC(O), NHC(O), CH₂, CH₂NH or CH₂O;

[0567] Q^{2A}, Q^{2B}, Q^{3A}, Q^{3B}, Q^{4A}, Q^{4B}, Q^{5A}, Q^{5B}, Q^{5C} are independently for each occurrence absent, alkylene, substituted alkylene wherin one or more methylenes can be interrupted or terminated by one or more of O, S, S(O), SO₂, N(R^{N}), C(R′)═C(R″), C≡C or C(O);

[0568] R^{2A}, R^{2B}, R^{3A}, R^{3B}, R^{4A}, R^{4B}, R^{5A}, R^{5B}, R^{5C} are each independently for each occurrence absent NH, O, S, CH₂, C(O)O, C(O)NH, NHCH(R^{a})C(O), —C(O)—CH(R^{a})—NH—, CO, CH═N—O,

[chemical structure]

or heterocyclyl;

[0569] L^{2A}, L^{2B}, L^{3A}, L^{3B}, L^{4A}, L^{4B}, L^{5A}, L^{5B} and L^{5C} represent the ligand; i.e. each independently for each occurrence a monosaccharide (such as GalNAc), disaccharide, trisaccharide, tetrasaccharide, oligosaccharide, or polysaccharide; and R^{a} is H or amino acid side chain. Trivalent conjugating GalNAc derivatives are particularly useful for use with RNAi agents for inhibiting the expression of a target gene, such as those of formula (XLIX):

[chemical structure]

[0570] wherein L^{5A}, L^{5B} and L^{5C} represent a monosaccharide, such as GalNAc derivative.

[0571] Examples of suitable bivalent and trivalent branched linker groups conjugating GalNAc derivatives include, but are not limited to, the structures recited above as formulas II, VII, XI, X, and XIII.

[0572] Representative U.S. Patents that teach the preparation of RNA conjugates include, but are not limited to, U.S. Pat. Nos. 4,828,979; 4,948,882; 5,218,105; 5,525,465; 5,541,313; 5,545,730; 5,552,538; 5,578,717, 5,580,731; 5,591,584; 5,109,124; 5,118,802; 5,138,045; 5,414,077; 5,486,603; 5,512,439; 5,578,718; 5,608,046; 4,587,044; 4,605,735; 4,667,025; 4,762,779; 4,789,737; 4,824,941; 4,835,263; 4,876,335; 4,904,582; 4,958,013; 5,082,830; 5,112,963; 5,214,136; 5,082,830; 5,112,963; 5,214,136; 5,245,022; 5,254,469; 5,258,506; 5,262,536; 5,272,250; 5,292,873; 5,317,098; 5,371,241, 5,391,723; 5,416,203, 5,451,463; 5,510,475; 5,512,667; 5,514,785; 5,565,552; 5,567,810; 5,574,142; 5,585,481; 5,587,371; 5,595,726; 5,597,696; 5,599,923; 5,599,928;5,688,941; 6,294,664; 6,320,017; 6,576,752; 6,783,931; 6,900,297; 7,037,646; and 8,106,022, the entire contents of each of which are hereby incorporated herein by reference.

[0573] It is not necessary for all positions in a given compound to be uniformly modified, and in fact more than one of the aforementioned modifications can be incorporated in a single compound or even at a single nucleoside within an iRNA. The present invention also includes iRNA compounds that are chimeric compounds.

[0574] “Chimeric” iRNA compounds or “chimeras,” in the context of this invention, are iRNA compounds, preferably dsRNA agents, that contain two or more chemically distinct regions, each made up of at least one monomer unit, i.e., a nucleotide in the case of a dsRNA compound. These iRNAs typically contain at least one region wherein the RNA is modified so as to confer upon the iRNA increased resistance to nuclease degradation, increased cellular uptake, or increased binding affinity for the target nucleic acid. An additional region of the iRNA can serve as a substrate for enzymes capable of cleaving RNA:DNA or RNA:RNA hybrids. By way of example, RNase H is a cellular endonuclease which cleaves the RNA strand of an RNA:DNA duplex. Activation of RNase H, therefore, results in cleavage of the RNA target, thereby greatly enhancing the efficiency of iRNA inhibition of gene expression. Consequently, comparable results can often be obtained with shorter iRNAs when chimeric dsRNAs are used, compared to phosphorothioate deoxy dsRNAs hybridizing to the same target region. Cleavage of the RNA target can be routinely detected by gel electrophoresis and, if necessary, associated nucleic acid hybridization techniques known in the art.

[0575] In certain instances, the RNA of an iRNA can be modified by a non-ligand group. A number of non-ligand molecules have been conjugated to iRNAs in order to enhance the activity, cellular distribution or cellular uptake of the iRNA, and procedures for performing such conjugations are available in the scientific literature. Such non-ligand moieties have included lipid moieties, such as cholesterol (Kubo, T. et al., Biochem. Biophys. Res. Comm., 2007, 365(1):54-61; Letsinger et al., Proc. Natl. Acad. Sci. USA, 1989, 86:6553), cholic acid (Manoharan et al., Bioorg. Med. Chem. Lett., 1994, 4:1053), a thioether, e.g., hexyl-S-tritylthiol (Manoharan et al., Ann. N.Y. Acad. Sci., 1992, 660:306; Manoharan et al., Bioorg. Med. Chem. Let., 1993, 3:2765), a thiocholesterol (Oberhauser et al., Nucl. Acids Res., 1992, 20:533), an aliphatic chain, e.g., dodecandiol or undecyl residues (Saison-Behmoaras et al., EMBO J., 1991, 10:111; Kabanov et al., FEBS Lett., 1990, 259:327; Svinarchuk et al., Biochimie, 1993, 75:49), a phospholipid, e.g., di-hexadecyl-rac-glycerol or triethylammonium 1,2-di-O-hexadecyl-rac-glycero-3-H-phosphonate (Manoharan et al., Tetrahedron Lett., 1995, 36:3651; Shea et al., Nucl. Acids Res., 1990, 18:3777), a polyamine or a polyethylene glycol chain (Manoharan et al., Nucleosides & Nucleotides, 1995, 14:969), or adamantane acetic acid (Manoharan et al., Tetrahedron Lett., 1995, 36:3651), a palmityl moiety (Mishra et al., Biochim. Biophys. Acta, 1995, 1264:229), or an octadecylamine or hexylamino-carbonyl-oxycholesterol moiety (Crooke et al., J. Pharmacol. Exp. Ther., 1996, 277:923). Representative United States patents that teach the preparation of such RNA conjugates have been listed above. Typical conjugation protocols involve the synthesis of RNAs bearing an aminolinker at one or more positions of the sequence. The amino group is then reacted with the molecule being conjugated using appropriate coupling or activating reagents. The conjugation reaction can be performed either with the RNA still bound to the solid support or following cleavage of the RNA, in solution phase. Purification of the RNA conjugate by HPLC typically affords the pure conjugate.

### V. Delivery of an RNAi Agent of the Disclosure

[0576] The delivery of an RNAi agent of the disclosure to a cell e.g., a cell within a subject, such as a human subject (e.g., a subject in need thereof, such as a subject having a MAPT-associated disorder, for example, Alzheimer's disease, FTD, PSP, or another tauopathy), can be achieved in a number of different ways. For example, delivery may be performed by contacting a cell with an RNAi agent of the disclosure either in vitro or in vivo. In vivo delivery may also be performed directly by administering a composition comprising an RNAi agent, e.g., a dsRNA, to a subject. Alternatively, in vivo delivery may be performed indirectly by administering one or more vectors that encode and direct the expression of the RNAi agent. These alternatives are discussed further below.

[0577] In general, any method of delivering a nucleic acid molecule (in vitro or in vivo) can be adapted for use with an RNAi agent of the disclosure (see e.g., Akhtar S. and Julian R L., (1992) Trends Cell. Biol. 2(5):139-144 and WO94/02595, which are incorporated herein by reference in their entireties). For in vivo delivery, factors to consider in order to deliver an RNAi agent include, for example, biological stability of the delivered agent, prevention of non-specific effects, and accumulation of the delivered agent in the target tissue. The non-specific effects of an RNAi agent can be minimized by local administration, for example, by direct injection or implantation into a tissue or topically administering the preparation. Local administration to a treatment site maximizes local concentration of the agent, limits the exposure of the agent to systemic tissues that can otherwise be harmed by the agent or that can degrade the agent, and permits a lower total dose of the RNAi agent to be administered. Several studies have shown successful knockdown of gene products when an RNAi agent is administered locally. For example, intraocular delivery of a VEGF dsRNA by intravitreal injection in cynomolgus monkeys (Tolentino, M J. et al., (2004) Retina 24:132-138) and subretinal injections in mice (Reich, S J. et al. (2003) Mol. Vis. 9:210-216) were both shown to prevent neovascularization in an experimental model of age-related macular degeneration. In addition, direct intratumoral injection of a dsRNA in mice reduces tumor volume (Pille, J. et al. (2005) Mol. Ther. 11:267-274) and can prolong survival of tumor-bearing mice (Kim, W J. et al., (2006) Mol. Ther. 14:343-350; Li, S. et al., (2007) Mol. Ther. 15:515-523). RNA interference has also shown success with local delivery to the CNS by direct injection (Dorn, G. et al., (2004) Nucleic Acids 32:e49; Tan, P H. et al. (2005) Gene Ther. 12:59-66; Makimura, H. et a.l (2002) BMC Neurosci. 3:18; Shishkina, G T., et al. (2004) Neuroscience 129:521-528; Thakker, E R., et al. (2004) Proc. Natl. Acad. Sci. U.S.A. 101:17270-17275; Akaneya, Y., et al. (2005) J. Neurophysiol. 93:594-602) and to the lungs by intranasal administration (Howard, K A. et al., (2006) Mol. Ther. 14:476-484; Zhang, X. et al., (2004) J. Biol. Chem. 279:10677-10684; Bitko, V. et al., (2005) Nat. Med. 11:50-55). For administering an RNAi agent systemically for the treatment of a disease, the RNA can be modified or alternatively delivered using a drug delivery system; both methods act to prevent the rapid degradation of the dsRNA by endo- and exo-nucleases in vivo. Modification of the RNA or the pharmaceutical carrier can also permit targeting of the RNAi agent to the target tissue and avoid undesirable off-target effects (e.g., without wishing to be bound by theory, use of GNAs as described herein has been identified to destabilize the seed region of a dsRNA, resulting in enhanced preference of such dsRNAs for on-target effectiveness, relative to off-target effects, as such off-target effects are significantly weakened by such seed region destabilization). RNAi agents can be modified by chemical conjugation to lipophilic groups such as cholesterol to enhance cellular uptake and prevent degradation. For example, an RNAi agent directed against ApoB conjugated to a lipophilic cholesterol moiety was injected systemically into mice and resulted in knockdown of apoB mRNA in both the liver and jejunum (Soutschek, J. et al., (2004) Nature 432:173-178). Conjugation of an RNAi agent to an aptamer has been shown to inhibit tumor growth and mediate tumor regression in a mouse model of prostate cancer (McNamara, J O. et al., (2006) Nat. Biotechnol. 24:1005-1015). In an alternative embodiment, the RNAi agent can be delivered using drug delivery systems such as a nanoparticle, a dendrimer, a polymer, liposomes, or a cationic delivery system. Positively charged cationic delivery systems facilitate binding of molecule RNAi agent (negatively charged) and also enhance interactions at the negatively charged cell membrane to permit efficient uptake of an RNAi agent by the cell. Cationic lipids, dendrimers, or polymers can either be bound to an RNAi agent, or induced to form a vesicle or micelle (see e.g., Kim S H. et al., (2008) Journal of Controlled Release 129(2):107-116) that encases an RNAi agent. The formation of vesicles or micelles further prevents degradation of the RNAi agent when administered systemically. Methods for making and administering cationic-RNAi agent complexes are well within the abilities of one skilled in the art (see e.g., Sorensen, D R., et al. (2003) J. Mol. Biol 327:761-766; Verma, U N. et al., (2003) Clin. Cancer Res. 9:1291-1300; Arnold, A S et al. (2007) J. Hypertens. 25:197-205, which are incorporated herein by reference in their entirety). Some non-limiting examples of drug delivery systems useful for systemic delivery of RNAi agents include DOTAP (Sorensen, D R., et al (2003), supra; Verma, U N. et al., (2003), supra), Oligofectamine, “solid nucleic acid lipid particles” (Zimmermann, T S. et al., (2006) Nature 441:111-114), cardiolipin (Chien, P Y. et al., (2005) Cancer Gene Ther. 12:321-328; Pal, A. et al., (2005) Int J. Oncol. 26:1087-1091), polyethyleneimine (Bonnet M E. et al., (2008) Pharm. Res. Aug 16 Epub ahead of print; Aigner, A. (2006) J. Biomed. Biotechnol. 71659), Arg-Gly-Asp (RGD) peptides (Liu, S. (2006) Mol. Pharm. 3:472-487), and polyamidoamines (Tomalia, D A. et al., (2007) Biochem. Soc. Trans. 35:61-67; Yoo, H. et al., (1999) Pharm. Res. 16:1799-1804). In some embodiments, an RNAi agent forms a complex with cyclodextrin for systemic administration. Methods for administration and pharmaceutical compositions of RNAi agents and cyclodextrins can be found in U.S. Patent No. 7, 427, 605, which is herein incorporated by reference in its entirety.

[0578] Certain aspects of the instant disclosure relate to a method of reducing the expression of a MAPT target gene in a cell, comprising contacting said cell with the double-stranded RNAi agent of the disclosure. In one embodiment, the cell is an extraheptic cell, optionally a CNS cell. In other embodiment, the cell is a heptic cell.

[0579] Another aspect of the disclosure relates to a method of reducing the expression of a MAPT target gene in a subject, comprising administering to the subject the double-stranded RNAi agent of the disclosure.

[0580] Another aspect of the disclosure relates to a method of treating a subject having a CNS disorder (neurodegenerative disorder), comprising administering to the subject a therapeutically effective amount of the double-stranded MAPT-targeting RNAi agent of the disclosure, thereby treating the subject. The neurodegenerative disorder of the subject is associated with an abnormality of MAPT gene encoded protein Tau. The abnormality of MAPT gene encoded protein Tau may result in aggregation of Tau in subject's brain.

[0581] Exemplary CNS disorders that can be treated by the method of the disclosure include MAPT-associated disease CNS disorder such as tauopathy, Alzheimer disease, frontotemporal dementia (FTD), behavioral variant frontotemporal dementia (bvFTD), nonfluent variant primary progressive aphasia (nfvPPA), primary progressive aphasia-semantic (PPA-S), primary progressive aphasia-logopenic (PPA-L), frontotemporal dementia with parkinsonism linked to chromosome 17 (FTDP-17), Pick's disease (PiD), argyrophilic grain disease (AGD), multiple system tauopathy with presenile dementia (MSTD), white matter tauopathy with globular glial inclusions (FTLD with GGIs), FTLD with MAPT mutations, neurofibrillary tangle (NFT) dementia, FTD with motor neuron disease, amyotrophic lateral sclerosis (ALS), corticobasal syndrome (CBS), corticobasal degeneration (CBD), progressive supranuclear palsy (PSP), Parkinson's disease, postencephalitic Parkinsonism, Niemann-Pick disease, Huntington disease, type 1 myotonic dystrophy, and Down syndrome (DS).

[0582] In one embodiment, the double-stranded RNAi agent is administered intrathecally. By intrathecal administration of the double-stranded RNAi agent, the method can reduce the expression of a MAPT target gene in a brain (e.g., striatum) or spine tissue, for instance, cortex, cerebellum, cervical spine, lumbar spine, and thoracic spine, immune cells such as monocytes and T-cells.

[0583] For ease of exposition the formulations, compositions and methods in this section are discussed largely with regard to modified siRNA compounds. It may be understood, however, that these formulations, compositions and methods can be practiced with other siRNA compounds, e.g., unmodified siRNA compounds, and such practice is within the disclosure. A composition that includes an RNAi agent can be delivered to a subject by a variety of routes. Exemplary routes include: intrathecal, intravenous, topical, rectal, anal, vaginal, nasal, pulmonary, and ocular.

[0584] The RNAi agents of the disclosure can be incorporated into pharmaceutical compositions suitable for administration. Such compositions typically include one or more species of RNAi agent and a pharmaceutically acceptable carrier. As used herein the language “pharmaceutically acceptable carrier” is intended to include any and all solvents, dispersion media, coatings, antibacterial and antifungal agents, isotonic and absorption delaying agents, and the like, compatible with pharmaceutical administration. The use of such media and agents for pharmaceutically active substances is well known in the art. Except insofar as any conventional media or agent is incompatible with the active compound, use thereof in the compositions is contemplated. Supplementary active compounds can also be incorporated into the compositions.

[0585] The pharmaceutical compositions of the present disclosure may be administered in a number of ways depending upon whether local or systemic treatment is desired and upon the area to be treated. Administration may be topical (including ophthalmic, vaginal, rectal, intranasal, transdermal), intrathecal, oral, or parenteral. Parenteral administration includes intravenous drip, subcutaneous, intraperitoneal or intramuscular injection, or intrathecal or intraventricular administration.

[0586] The route and site of administration may be chosen to enhance targeting. For example, to target neural or spinal tissue, intrathecal injection would be a logical choice. Lung cells might be targeted by administering the RNAi agent in aerosol form. The vascular endothelial cells could be targeted by coating a balloon catheter with the RNAi agent and mechanically introducing the RNA.

[0587] Formulations for topical administration may include transdermal patches, ointments, lotions, creams, gels, drops, suppositories, sprays, liquids, and powders. Conventional pharmaceutical carriers, aqueous, powder or oily bases, thickeners and the like may be necessary or desirable. Coated condoms, gloves and the like may also be useful.

[0588] Compositions for oral administration include powders or granules, suspensions or solutions in water, syrups, elixirs or non-aqueous media, tablets, capsules, lozenges, or troches. In the case of tablets, carriers that can be used include lactose, sodium citrate and salts of phosphoric acid. Various disintegrants such as starch, and lubricating agents such as magnesium stearate, sodium lauryl sulfate and talc, are commonly used in tablets. For oral administration in capsule form, useful diluents are lactose and high molecular weight polyethylene glycols. When aqueous suspensions are required for oral use, the nucleic acid compositions can be combined with emulsifying and suspending agents. If desired, certain sweetening or flavoring agents can be added.

[0589] Compositions for intrathecal or intraventricular administration may include sterile aqueous solutions which may also contain buffers, diluents, and other suitable additives.

[0590] Formulations for parenteral administration may include sterile aqueous solutions which may also contain buffers, diluents, and other suitable additives. Intraventricular injection may be facilitated by an intraventricular catheter, for example, attached to a reservoir. For intravenous use, the total concentration of solutes may be controlled to render the preparation isotonic.

[0591] In one embodiment, the administration of the siRNA compound, e.g., a double-stranded siRNA compound, or ssiRNA compound, composition is parenteral, e.g., intravenous (e.g., as a bolus or as a diffusible infusion), intradermal, intraperitoneal, intramuscular, intrathecal, intraventricular, intracranial, subcutaneous, transmucosal, buccal, sublingual, endoscopic, rectal, oral, vaginal, topical, pulmonary, intranasal, urethral, or ocular. Administration can be provided by the subject or by another person, e.g., a health care provider. The medication can be provided in measured doses or in a dispenser which delivers a metered dose. Selected modes of delivery are discussed in more detail below.

[0592] A. Intrathecal Administration.

[0593] In one embodiment, the double-stranded RNAi agent is delivered by intrathecal injection (i.e., injection into the spinal fluid which bathes the brain and spinal cord tissue). Intrathecal injection of RNAi agents into the spinal fluid can be performed as a bolus injection or via minipumps which can be implanted beneath the skin, providing a regular and constant delivery of siRNA into the spinal fluid. The circulation of the spinal fluid from the choroid plexus, where it is produced, down around the spinal chord and dorsal root ganglia and subsequently up past the cerebellum and over the cortex to the arachnoid granulations, where the fluid can exit the CNS, that, depending upon size, stability, and solubility of the compounds injected, molecules delivered intrathecally could hit targets throughout the entire CNS.

[0594] In some embodiments, the intrathecal administration is via a pump. The pump may be a surgically implanted osmotic pump. In one embodiment, the osmotic pump is implanted into the subarachnoid space of the spinal canal to facilitate intrathecal administration.

[0595] In some embodiments, the intrathecal administration is via an intrathecal delivery system for a pharmaceutical including a reservoir containing a volume of the pharmaceutical agent, and a pump configured to deliver a portion of the pharmaceutical agent contained in the reservoir. More details about this intrathecal delivery system may be found in WO 2015/116658, which is incorporated by reference in its entirety.

[0596] The amount of intrathecally injected RNAi agents may vary from one target gene to another target gene and the appropriate amount that has to be applied may have to be determined individually for each target gene. Typically, this amount ranges from 10 μg to 2 mg, preferably 50 μg to 1500 μg, more preferably 100 μg to 1000 μg.

[0597] B. Vector Encoded RNAi Agents of the Disclosure

[0598] RNAi agents targeting the MAPT gene can be expressed from transcription units inserted into DNA or RNA vectors (see, e.g., Couture, A, et al., TIG. (1996), 12:5-10; WO 00/22113, WO 00/22114, and U.S. Pat. No. 6,054,299). Expression is preferablysustained (months or longer), depending upon the specific construct used and the target tissue or cell type. These transgenes can be introduced as a linear construct, a circular plasmid, or a viral vector, which can be an integrating or non-integrating vector. The transgene can also be constructed to permit it to be inherited as an extrachromosomal plasmid (Gassmann, et al., (1995) Proc. Natl. Acad. Sci. USA 92:1292).

[0599] The individual strand or strands of an RNAi agent can be transcribed from a promoter on an expression vector. Where two separate strands are to be expressed to generate, for example, a dsRNA, two separate expression vectors can be co-introduced (e.g., by transfection or infection) into a target cell. Alternatively, each individual strand of a dsRNA can be transcribed by promoters both of which are located on the same expression plasmid. In one embodiment, a dsRNA is expressed as inverted repeat polynucleotides joined by a linker polynucleotide sequence such that the dsRNA has a stem and loop structure.

[0600] RNAi agent expression vectors are generally DNA plasmids or viral vectors. Expression vectors compatible with eukaryotic cells, preferably those compatible with vertebrate cells, can be used to produce recombinant constructs for the expression of an RNAi agent as described herein. Delivery of RNAi agent expressing vectors can be systemic, such as by intravenous or intramuscular administration, by administration to target cells ex-planted from the patient followed by reintroduction into the patient, or by any other means that allows for introduction into a desired target cell.

[0601] Viral vector systems which can be utilized with the methods and compositions described herein include, but are not limited to, (a) adenovirus vectors; (b) retrovirus vectors, including but not limited to lentiviral vectors, moloney murine leukemia virus, etc.; (c) adeno-associated virus vectors; (d) herpes simplex virus vectors; (e) SV 40 vectors; (f) polyoma virus vectors; (g) papilloma virus vectors; (h) picornavirus vectors; (i) pox virus vectors such as an orthopox, e.g., vaccinia virus vectors or avipox, e.g. canary pox or fowl pox; and (j) a helper-dependent or gutless adenovirus. Replication-defective viruses can also be advantageous. Different vectors will or will not become incorporated into the cells' genome. The constructs can include viral sequences for transfection, if desired. Alternatively, the construct can be incorporated into vectors capable of episomal replication, e.g. EPV and EBV vectors. Constructs for the recombinant expression of an RNAi agent will generally require regulatory elements, e.g., promoters, enhancers, etc., to ensure the expression of the RNAi agent in target cells. Other aspects to consider for vectors and constructs are known in the art.

### VI. Pharmaceutical Compositions of the Invention

[0602] The present disclosure also includes pharmaceutical compositions and formulations which include the RNAi agents of the disclosure. In one embodiment, provided herein are pharmaceutical compositions containing an RNAi agent, as described herein, and a pharmaceutically acceptable carrier. The pharmaceutical compositions containing the RNAi agent are useful for treating a disease or disorder associated with the expression or activity of MAPT, e.g., MAPT-associated disease.

[0603] In some embodiments, the pharmaceutical composition of the invention is the dsRNA agent for selective inhibition of exon 10-containing MAPT transcripts.

[0604] In some embodiments, the pharmaceutical compositions of the invention are sterile. In another embodiment, the pharmaceutical compositions of the invention are pyrogen free.

[0605] Such pharmaceutical compositions are formulated based on the mode of delivery. One example is compositions that are formulated for systemic administration via parenteral delivery, e.g., by intravenous (IV), intramuscular (IM), or for subcutaneous (subQ) delivery. Another example is compositions that are formulated for direct delivery into the CNS, e.g., by intrathecal or intravitreal routes of injection, optionally by infusion into the brain (e.g., striatum), such as by continuous pump infusion.

[0606] The pharmaceutical compositions of the disclosure may be administered in dosages sufficient to inhibit expression of a MAPT gene. In general, a suitable dose of an RNAi agent of the disclosure will be in the range of about 0.001 to about 200.0 milligrams per kilogram body weight of the recipient per day, generally in the range of about 1 to 50 mg per kilogram body weight per day.

[0607] A repeat-dose regimen may include administration of a therapeutic amount of an RNAi agent on a regular basis, such as monthly to once every six months. In certain embodiments, the RNAi agent is administered about once per quarter (i.e., about once every three months) to about twice per year.

[0608] After an initial treatment regimen (e.g., loading dose), the treatments can be administered on a less frequent basis.

[0609] In other embodiments, a single dose of the pharmaceutical compositions can be long lasting, such that subsequent doses are administered at not more than 1, 2, 3, or 4 or more month intervals. In some embodiments of the disclosure, a single dose of the pharmaceutical compositions of the disclosure is administered once per month. In other embodiments of the disclosure, a single dose of the pharmaceutical compositions of the disclosure is administered once per quarter to twice per year.

[0610] The skilled artisan will appreciate that certain factors can influence the dosage and timing required to effectively treat a subject, including but not limited to the severity of the disease or disorder, previous treatments, the general health or age of the subject, and other diseases present. Moreover, treatment of a subject with a therapeutically effective amount of a composition can include a single treatment or a series of treatments.

[0611] Advances in mouse genetics have generated a number of mouse models for the study of various human diseases, such as ALS and FTD that would benefit from reduction in the expression of MAPT. Such models can be used for in vivo testing of RNAi agents, as well as for determining a therapeutically effective dose. Suitable rodent models are known in the art and include, for example, those described in, for example, Cepeda, et al. (ASN Neuro (2010) 2(2):e00033) and Pouladi, et al. (Nat Reviews (2013) 14:708).

[0612] The pharmaceutical compositions of the present disclosure can be administered in a number of ways depending upon whether local or systemic treatment is desired and upon the area to be treated. Administration can be topical (e.g., by a transdermal patch), pulmonary, e.g., by inhalation or insufflation of powders or aerosols, including by nebulizer; intratracheal, intranasal, epidermal and transdermal, oral or parenteral. Parenteral administration includes intravenous, intraarterial, subcutaneous, intraperitoneal or intramuscular injection or infusion; subdermal, e.g., via an implanted device; or intracranial, e.g., by intraparenchymal, intrathecal or intraventricular, administration.

[0613] The RNAi agents can be delivered in a manner to target a particular tissue, such as the CNS (e.g., neuronal, glial or vascular tissue of the brain).

[0614] Pharmaceutical compositions and formulations for topical administration can include transdermal patches, ointments, lotions, creams, gels, drops, suppositories, sprays, liquids and powders. Conventional pharmaceutical carriers, aqueous, powder or oily bases, thickeners and the like can be necessary or desirable. Coated condoms, gloves and the like can also be useful. Suitable topical formulations include those in which the RNAi agents featured in the disclosure are in admixture with a topical delivery agent such as lipids, liposomes, fatty acids, fatty acid esters, steroids, chelating agents and surfactants. Suitable lipids and liposomes include neutral (e.g., dioleoylphosphatidyl DOPE ethanolamine, dimyristoylphosphatidyl choline DMPC, distearolyphosphatidyl choline) negative (e.g., dimyristoylphosphatidyl glycerol DMPG) and cationic (e.g., dioleoyltetramethylaminopropyl DOTAP and dioleoylphosphatidyl ethanolamine DOTMA). RNAi agents featured in the disclosure can be encapsulated within liposomes or can form complexes thereto, in particular to cationic liposomes. Alternatively, RNAi agents can be complexed to lipids, in particular to cationic lipids. Suitable fatty acids and esters include but are not limited to arachidonic acid, oleic acid, eicosanoic acid, lauric acid, caprylic acid, capric acid, myristic acid, palmitic acid, stearic acid, linoleic acid, linolenic acid, dicaprate, tricaprate, monoolein, dilaurin, glyceryl 1-monocaprate, 1-dodecylazacycloheptan-2-one, an acylcarnitine, an acylcholine, or a C₁₋₂₀ alkyl ester (e.g., isopropylmyristate IPM), monoglyceride, diglyceride or pharmaceutically acceptable salt thereof. Topical formulations are described in detail in U.S. Pat. No. 6,747,014, which is incorporated herein by reference.

[0615] A. RNAi Agent Formulations Comprising Membranous Molecular Assemblies

[0616] An RNAi agent for use in the compositions and methods of the disclosure can be formulated for delivery in a membranous molecular assembly, e.g., a liposome or a micelle. As used herein, the term “liposome” refers to a vesicle composed of amphiphilic lipids arranged in at least one bilayer, e.g., one bilayer or a plurality of bilayers. Liposomes include unilamellar and multilamellar vesicles that have a membrane formed from a lipophilic material and an aqueous interior. The aqueous portion contains the RNAi agent composition. The lipophilic material isolates the aqueous interior from an aqueous exterior, which typically does not include the RNAi agent composition, although in some examples, it may. Liposomes are useful for the transfer and delivery of active ingredients to the site of action. Because the liposomal membrane is structurally similar to biological membranes, when liposomes are applied to a tissue, the liposomal bilayer fuses with bilayer of the cellular membranes. As the merging of the liposome and cell progresses, the internal aqueous contents that include the RNAi agent are delivered into the cell where the RNAi agent can specifically bind to a target RNA and can mediate RNAi. In some cases, the liposomes are also specifically targeted, e.g., to direct the RNAi agent to particular cell types.

[0617] A liposome containing an RNAi agent can be prepared by a variety of methods. In one example, the lipid component of a liposome is dissolved in a detergent so that micelles are formed with the lipid component. For example, the lipid component can be an amphipathic cationic lipid or lipid conjugate. The detergent can have a high critical micelle concentration and may be nonionic. Exemplary detergents include cholate, CHAPS, octylglucoside, deoxycholate, and lauroyl sarcosine. The RNAi agent preparation is then added to the micelles that include the lipid component. The cationic groups on the lipid interact with the RNAi agent and condense around the RNAi agent to form a liposome. After condensation, the detergent is removed, e.g., by dialysis, to yield a liposomal preparation of RNAi agent.

[0618] If necessary a carrier compound that assists in condensation can be added during the condensation reaction, e.g., by controlled addition. For example, the carrier compound can be a polymer other than a nucleic acid (e.g., spermine or spermidine). pH can also be adjusted to favor condensation.

[0619] Methods for producing stable polynucleotide delivery vehicles, which incorporate a polynucleotide/cationic lipid complex as structural components of the delivery vehicle, are further described in, e.g., WO 96/37194, the entire contents of which are incorporated herein by reference. Liposome formation can also include one or more aspects of exemplary methods described in Felgner, P. L. et al., (1987) Proc. Natl. Acad. Sci. USA 8:7413-7417; U.S. Pat. Nos. 4,897,355; 5,171,678; Bangham et al., (1965) M. Mol. Biol. 23:238; Olson et al., (1979) Biochim. Biophys. Acta 557:9; Szoka et al., (1978) Proc. Natl. Acad. Sci. 75: 4194; Mayhew et al., (1984) Biochim. Biophys. Acta 775:169; Kim et al., (1983) Biochim. Biophys. Acta 728:339; and Fukunaga et al., (1984) Endocrinol. 115:757. Commonly used techniques for preparing lipid aggregates of appropriate size for use as delivery vehicles include sonication and freeze-thaw plus extrusion (see, e.g., Mayer et al., (1986) Biochim. Biophys. Acta 858:161. Microfluidization can be used when consistently small (50 to 200 nm) and relatively uniform aggregates are desired (Mayhew et al., (1984) Biochim. Biophys. Acta 775:169. These methods are readily adapted to packaging RNAi agent preparations into liposomes.

[0620] Liposomes fall into two broad classes. Cationic liposomes are positively charged liposomes which interact with the negatively charged nucleic acid molecules to form a stable complex. The positively charged nucleic acid/liposome complex binds to the negatively charged cell surface and is internalized in an endosome. Due to the acidic pH within the endosome, the liposomes are ruptured, releasing their contents into the cell cytoplasm (Wang et al. (1987) Biochem. Biophys. Res. Commun., 147:980-985).

[0621] Liposomes, which are pH-sensitive or negatively charged, entrap nucleic acids rather than complex with them. Since both the nucleic acid and the lipid are similarly charged, repulsion rather than complex formation occurs. Nevertheless, some nucleic acid is entrapped within the aqueous interior of these liposomes. pH sensitive liposomes have been used to deliver nucleic acids encoding the thymidine kinase gene to cell monolayers in culture. Expression of the exogenous gene was detected in the target cells (Zhou et al. (1992) Journal of Controlled Release, 19:269-274).

[0622] One major type of liposomal composition includes phospholipids other than naturally-derived phosphatidylcholine. Neutral liposome compositions, for example, can be formed from dimyristoyl phosphatidylcholine (DMPC) or dipalmitoyl phosphatidylcholine (DPPC). Anionic liposome compositions generally are formed from dimyristoyl phosphatidylglycerol, while anionic fusogenic liposomes are formed primarily from dioleoyl phosphatidylethanolamine (DOPE). Another type of liposomal composition is formed from phosphatidylcholine (PC) such as, for example, soybean PC, and egg PC. Another type is formed from mixtures of phospholipid or phosphatidylcholine or cholesterol.

[0623] Examples of other methods to introduce liposomes into cells in vitro and in vivo include U.S. Pat. Nos. 5,283,185; 5,171,678; WO 94/00569; WO 93/24640; WO 91/16024; Felgner, (1994) J. Biol. Chem. 269:2550; Nabel, (1993) Proc. Natl. Acad. Sci. 90:11307; Nabel, (1992) Human Gene Ther. 3:649; Gershon, (1993) Biochem. 32:7143; and Strauss, (1992) EMBO J. 11:417.

[0624] Non-ionic liposomal systems have also been examined to determine their utility in the delivery of drugs to the skin, in particular systems comprising non-ionic surfactant and cholesterol. Non-ionic liposomal formulations comprising Novasome™ I (glyceryl dilaurate/cholesterol/polyoxyethylene-10-stearyl ether) and Novasome™ II (glyceryl distearate/cholesterol/polyoxyethylene-10-stearyl ether) were used to deliver cyclosporin-A into the dermis of mouse skin. Results indicated that such non-ionic liposomal systems were effective in facilitating the deposition of cyclosporine A into different layers of the skin (Hu et al., (1994) S.T.P.Pharma. Sci., 4(6):466).

[0625] Liposomes also include “sterically stabilized” liposomes, a term which, as used herein, refers to liposomes comprising one or more specialized lipids that, when incorporated into liposomes, result in enhanced circulation lifetimes relative to liposomes lacking such specialized lipids. Examples of sterically stabilized liposomes are those in which part of the vesicle-forming lipid portion of the liposome (A) comprises one or more glycolipids, such as monosialoganglioside G_{M1}, or (B) is derivatized with one or more hydrophilic polymers, such as a polyethylene glycol (PEG) moiety. While not wishing to be bound by any particular theory, it is thought in the art that, at least for sterically stabilized liposomes containing gangliosides, sphingomyelin, or PEG-derivatized lipids, the enhanced circulation half-life of these sterically stabilized liposomes derives from a reduced uptake into cells of the reticuloendothelial system (RES) (Allen et al., (1987) FEBS Letters, 223:42; Wu et al., (1993) Cancer Research, 53:3765).

[0626] Various liposomes comprising one or more glycolipids are known in the art. Papahadjopoulos et al. (Ann. N.Y. Acad. Sci., (1987), 507:64) reported the ability of monosialoganglioside G_{M1}, galactocerebroside sulfate and phosphatidylinositol to improve blood half-lives of liposomes. These findings were expounded upon by Gabizon et al. (Proc. Natl. Acad. Sci. U.S.A., (1988), 85,:6949). U.S. Pat. No. 4,837,028 and WO 88/04924, both to Allen et al., disclose liposomes comprising (1) sphingomyelin and (2) the ganglioside G_{M1} or a galactocerebroside sulfate ester. U.S. Pat. No. 5,543,152 (Webb et al.) discloses liposomes comprising sphingomyelin. Liposomes comprising 1,2-sn-dimyristoylphosphatidylcholine are disclosed in WO 97/13499 (Lim et al).

[0627] In one embodiment, cationic liposomes are used. Cationic liposomes possess the advantage of being able to fuse to the cell membrane. Non-cationic liposomes, although not able to fuse as efficiently with the plasma membrane, are taken up by macrophages in vivo and can be used to deliver RNAi agents to macrophages.

[0628] Further advantages of liposomes include: liposomes obtained from natural phospholipids are biocompatible and biodegradable; liposomes can incorporate a wide range of water and lipid soluble drugs; liposomes can protect encapsulated RNAi agents in their internal compartments from metabolism and degradation (Rosoff, in “Pharmaceutical Dosage Forms,” Lieberman, Rieger and Banker (Eds.), 1988, volume 1, p. 245). Important considerations in the preparation of liposome formulations are the lipid surface charge, vesicle size and the aqueous volume of the liposomes.

[0629] A positively charged synthetic cationic lipid, N-[1-(2,3-dioleyloxy)propyl]-N,N,N-trimethylammonium chloride (DOTMA) can be used to form small liposomes that interact spontaneously with nucleic acid to form lipid-nucleic acid complexes which are capable of fusing with the negatively charged lipids of the cell membranes of tissue culture cells, resulting in delivery of RNAi agent (see, e.g., Felgner, P. L. et al., (1987) Proc. Natd. Acad. Sci. USA 8:7413-7417, and U.S. Pat. No. 4,897,355 for a description of DOTMA and its use with DNA).

[0630] A DOTMA analogue, 1,2-bis(oleoyloxy)-3-(trimethylammonia)propane (DOTAP) can be used in combination with a phospholipid to form DNA-complexing vesicles. Lipofectin™ Bethesda Research Laboratories, Gaithersburg, Md.) is an effective agent for the delivery of highly anionic nucleic acids into living tissue culture cells that comprise positively charged DOTMA liposomes which interact spontaneously with negatively charged polynucleotides to form complexes. When enough positively charged liposomes are used, the net charge on the resulting complexes is also positive. Positively charged complexes prepared in this way spontaneously attach to negatively charged cell surfaces, fuse with the plasma membrane, and efficiently deliver functional nucleic acids into, for example, tissue culture cells. Another commercially available cationic lipid, 1,2-bis(oleoyloxy)-3,3-(trimethylammonia)propane (“DOTAP”) (Boehringer Mannheim, Indianapolis, Ind.) differs from DOTMA in that the oleoyl moieties are linked by ester, rather than ether linkages.

[0631] Other reported cationic lipid compounds include those that have been conjugated to a variety of moieties including, for example, carboxyspermine which has been conjugated to one of two types of lipids and includes compounds such as 5-carboxyspermylglycine dioctaoleoylamide (“DOGS”) (Transfectam™, Promega, Madison, Wis.) and dipalmitoylphosphatidylethanolamine 5-carboxyspermyl-amide (“DPPES”) (see, e.g., U.S. Pat. No. 5,171,678).

[0632] Another cationic lipid conjugate includes derivatization of the lipid with cholesterol (“DC-Chol”) which has been formulated into liposomes in combination with DOPE (See, Gao, X. and Huang, L., (1991) Biochim. Biophys. Res. Commun. 179:280). Lipopolylysine, made by conjugating polylysine to DOPE, has been reported to be effective for transfection in the presence of serum (Zhou, X. et al., (1991) Biochim. Biophys. Acta 1065:8). For certain cell lines, these liposomes containing conjugated cationic lipids, are said to exhibit lower toxicity and provide more efficient transfection than the DOTMA-containing compositions. Other commercially available cationic lipid products include DMRIE and DMRIE-HP (Vical, La Jolla, Calif.) and Lipofectamine (DOSPA) (Life Technology, Inc., Gaithersburg, Md.). Other cationic lipids suitable for the delivery of oligonucleotides are described in WO 98/39359 and WO 96/37194.

[0633] Liposomal formulations are particularly suited for topical administration; liposomes present several advantages over other formulations. Such advantages include reduced side effects related to high systemic absorption of the administered drug, increased accumulation of the administered drug at the desired target, and the ability to administer RNAi agent into the skin. In some implementations, liposomes are used for delivering RNAi agent to epidermal cells and also to enhance the penetration of RNAi agent into dermal tissues, e.g., into skin. For example, the liposomes can be applied topically. Topical delivery of drugs formulated as liposomes to the skin has been documented (see, e.g., Weiner et al., (1992) Journal of Drug Targeting, vol. 2,405-410 and du Plessis et al., (1992) Antiviral Research, 18:259-265; Mannino, R. J. and Fould-Fogerite, S., (1998) Biotechniques 6:682-690; Itani, T. et al., (1987) Gene 56:267-276; Nicolau, C. et al. (1987) Meth. Enzymol. 149:157-176; Straubinger, R. M. and Papahadjopoulos, D. (1983) Meth. Enzymol. 101:512-527; Wang, C. Y. and Huang, L., (1987) Proc. Natl. Acad. Sci. USA 84:7851-7855).

[0634] Non-ionic liposomal systems have also been examined to determine their utility in the delivery of drugs to the skin, in particular systems comprising non-ionic surfactant and cholesterol. Non-ionic liposomal formulations comprising Novasome I (glyceryl dilaurate/cholesterol/polyoxyethylene-10-stearyl ether) and Novasome II (glyceryl distearate/cholesterol/polyoxyethylene-10-stearyl ether) were used to deliver a drug into the dermis of mouse skin. Such formulations with RNAi agent are useful for treating a dermatological disorder.

[0635] Liposomes that include RNAi agents can be made highly deformable. Such deformability can enable the liposomes to penetrate through pore that are smaller than the average radius of the liposome. For example, transfersomes are a type of deformable liposomes. Transferosomes can be made by adding surface edge activators, usually surfactants, to a standard liposomal composition. Transfersomes that include RNAi agent can be delivered, for example, subcutaneously by infection in order to deliver RNAi agent to keratinocytes in the skin. In order to cross intact mammalian skin, lipid vesicles must pass through a series of fine pores, each with a diameter less than 50 nm, under the influence of a suitable transdermal gradient. In addition, due to the lipid properties, these transferosomes can be self-optimizing (adaptive to the shape of pores, e.g., in the skin), self-repairing, and can frequently reach their targets without fragmenting, and often self-loading.

[0636] Other formulations amenable to the present disclosure are described in U.S. provisional application Ser. No. 61/018,616, filed Jan. 2, 2008; 61/018,611, filed Jan. 2, 2008; 61/039,748, filed Mar. 26, 2008; 61/047,087, filed Apr. 22, 2008 and 61/051,528, filed May 8, 2008. PCT application number PCT/US2007/080331, filed Oct. 3, 2007, also describes formulations that are amenable to the present disclosure.

[0637] Transfersomes, yet another type of liposomes, are highly deformable lipid aggregates which are attractive candidates for drug delivery vehicles. Transfersomes can be described as lipid droplets which are so highly deformable that they are easily able to penetrate through pores which are smaller than the droplet. Transfersomes are adaptable to the environment in which they are used, e.g., they are self-optimizing (adaptive to the shape of pores in the skin), self-repairing, frequently reach their targets without fragmenting, and often self-loading. To make transfersomes it is possible to add surface edge-activators, usually surfactants, to a standard liposomal composition. Transfersomes have been used to deliver serum albumin to the skin. The transfersome-mediated delivery of serum albumin has been shown to be as effective as subcutaneous injection of a solution containing serum albumin.

[0638] Surfactants find wide application in formulations such as those described herein, particularlay in emulsions (including microemulsions) and liposomes. The most common way of classifying and ranking the properties of the many different types of surfactants, both natural and synthetic, is by the use of the hydrophile/lipophile balance (HLB). The nature of the hydrophilic group (also known as the “head”) provides the most useful means for categorizing the different surfactants used in formulations (Rieger, in Pharmaceutical Dosage Forms, Marcel Dekker, Inc., New York, N.Y., 1988, p. 285).

[0639] If the surfactant molecule is not ionized, it is classified as a nonionic surfactant. Nonionic surfactants find wide application in pharmaceutical and cosmetic products and are usable over a wide range of pH values. In general, their HLB values range from 2 to about 18 depending on their structure. Nonionic surfactants include nonionic esters such as ethylene glycol esters, propylene glycol esters, glyceryl esters, polyglyceryl esters, sorbitan esters, sucrose esters, and ethoxylated esters. Nonionic alkanolamides and ethers such as fatty alcohol ethoxylates, propoxylated alcohols, and ethoxylated/propoxylated block polymers are also included in this class. The polyoxyethylene surfactants are the most popular members of the nonionic surfactant class.

[0640] If the surfactant molecule carries a negative charge when it is dissolved or dispersed in water, the surfactant is classified as anionic. Anionic surfactants include carboxylates such as soaps, acyl lactylates, acyl amides of amino acids, esters of sulfuric acid such as alkyl sulfates and ethoxylated alkyl sulfates, sulfonates such as alkyl benzene sulfonates, acyl isethionates, acyl taurates and sulfosuccinates, and phosphates. The most important members of the anionic surfactant class are the alkyl sulfates and the soaps.

[0641] If the surfactant molecule carries a positive charge when it is dissolved or dispersed in water, the surfactant is classified as cationic. Cationic surfactants include quaternary ammonium salts and ethoxylated amines. The quaternary ammonium salts are the most used members of this class.

[0642] If the surfactant molecule has the ability to carry either a positive or negative charge, the surfactant is classified as amphoteric. Amphoteric surfactants include acrylic acid derivatives, substituted alkylamides, N-alkylbetaines and phosphatides.

The use of surfactants in drug products, formulations and in emulsions has been reviewed (Rieger, in Pharmaceutical Dosage Forms, Marcel Dekker, Inc., New York, N.Y., 1988, p. 285).

[0643] The RNAi agent for use in the methods of the disclosure can also be provided as micellar formulations. “Micelles” are defined herein as a particular type of molecular assembly in which amphipathic molecules are arranged in a spherical structure such that all the hydrophobic portions of the molecules are directed inward, leaving the hydrophilic portions in contact with the surrounding aqueous phase. The converse arrangement exists if the environment is hydrophobic.

[0644] A mixed micellar formulation suitable for delivery through transdermal membranes may be prepared by mixing an aqueous solution of the siRNA composition, an alkali metal C₈ to C₂₂ alkyl sulphate, and a micelle forming compounds. Exemplary micelle forming compounds include lecithin, hyaluronic acid, pharmaceutically acceptable salts of hyaluronic acid, glycolic acid, lactic acid, chamomile extract, cucumber extract, oleic acid, linoleic acid, linolenic acid, monoolein, monooleates, monolaurates, borage oil, evening of primrose oil, menthol, trihydroxy oxo cholanyl glycine and pharmaceutically acceptable salts thereof, glycerin, polyglycerin, lysine, polylysine, triolein, polyoxyethylene ethers and analogues thereof, polidocanol alkyl ethers and analogues thereof, chenodeoxycholate, deoxycholate, and mixtures thereof. The micelle forming compounds may be added at the same time or after addition of the alkali metal alkyl sulphate. Mixed micelles will form with substantially any kind of mixing of the ingredients but vigorous mixing in order to provide smaller size micelles.

[0645] In one method a first micellar composition is prepared which contains the siRNA composition and at least the alkali metal alkyl sulphate. The first micellar composition is then mixed with at least three micelle forming compounds to form a mixed micellar composition. In another method, the micellar composition is prepared by mixing the siRNA composition, the alkali metal alkyl sulphate and at least one of the micelle forming compounds, followed by addition of the remaining micelle forming compounds, with vigorous mixing.

[0646] Phenol or m-cresol may be added to the mixed micellar composition to stabilize the formulation and protect against bacterial growth. Alternatively, phenol or m-cresol may be added with the micelle forming ingredients. An isotonic agent such as glycerin may also be added after formation of the mixed micellar composition.

[0647] For delivery of the micellar formulation as a spray, the formulation can be put into an aerosol dispenser and the dispenser is charged with a propellant. The propellant, which is under pressure, is in liquid form in the dispenser. The ratios of the ingredients are adjusted so that the aqueous and propellant phases become one, i.e., there is one phase. If there are two phases, it is necessary to shake the dispenser prior to dispensing a portion of the contents, e.g., through a metered valve. The dispensed dose of pharmaceutical agent is propelled from the metered valve in a fine spray.

[0648] Propellants may include hydrogen-containing chlorofluorocarbons, hydrogen-containing fluorocarbons, dimethyl ether and diethyl ether. In certain embodiments, HFA 134a (1,1,1,2 tetrafluoroethane) may be used.

[0649] The specific concentrations of the essential ingredients can be determined by relatively straightforward experimentation. For absorption through the oral cavities, it is often desirable to increase, e.g., at least double or triple, the dosage for through injection or administration through the gastrointestinal tract.

[0650] B. Lipid Particles

[0651] RNAi agents, e.g., dsRNAs of in the disclosure may be fully encapsulated in a lipid formulation, e.g., a LNP, or other nucleic acid-lipid particle.

[0652] As used herein, the term “LNP” refers to a stable nucleic acid-lipid particle. LNPs typically contain a cationic lipid, a non-cationic lipid, and a lipid that prevents aggregation of the particle (e.g., a PEG-lipid conjugate). LNPs are extremely useful for systemic applications, as they exhibit extended circulation lifetimes following intravenous (i.v.) injection and accumulate at distal sites (e.g., sites physically separated from the administration site). LNPs include “pSPLP,” which include an encapsulated condensing agent-nucleic acid complex as set forth in WO 00/03683. The particles of the present disclosure typically have a mean diameter of about 50 nm to about 150 nm, more typically about 60 nm to about 130 nm, more typically about 70 nm to about 110 nm, most typically about 70 nm to about 90 nm, and are substantially nontoxic. In addition, the nucleic acids when present in the nucleic acid-lipid particles of the present disclosure are resistant in aqueous solution to degradation with a nuclease. Nucleic acid-lipid particles and their method of preparation are disclosed in, e.g., U.S. Pat. Nos. 5,976,567; 5,981,501; 6,534,484; 6,586,410; 6,815,432; United States Patent Publication No. 2010/0324120 and WO 96/40964.

[0653] In one embodiment, the lipid to drug ratio (mass/mass ratio) (e.g., lipid to dsRNA ratio) will be in the range of from about 1:1 to about 50:1, from about 1:1 to about 25:1, from about 3:1 to about 15:1, from about 4:1 to about 10:1, from about 5:1 to about 9:1, or about 6:1 to about 9:1. Ranges intermediate to the above recited ranges are also contemplated to be part of the disclosure.

[0654] Certain specific LNP formulations for delivery of RNAi agents have been described in the art, including, e.g., “LNP01” formulations as described in, e.g., WO 2008/042973, which is hereby incorporated by reference.

[0655] Additional exemplary lipid-dsRNA formulations are identified in the Table 1 below.

TABLE 1

| | | cationic lipid/non-cationic |
|---|---|---|
| | | lipid/cholesterol/PEG-lipid conjugate |
| | Ionizable/Cationic Lipid | Lipid:siRNA ratio |
| SNALP-1 | 1,2-Dilinolenyloxy-N,N- | DLinDMA/DPPC/Cholesterol/PEG- |
| | dimethylaminopropane (DLinDMA) | cDMA |
| | | (57.1/7.1/34.4/1.4) |
| | | lipid:siRNA~7:1 |
| 2-XTC | 2,2-Dilinoleyl-4-dimethylaminoethyl-[1,3]- | XTC/DPPC/Cholesterol/PEG-cDMA |
| | dioxolane (XTC) | 57.1/7.1/34.4/1.4 |
| | | lipid:siRNA~7:1 |
| LNP05 | 2,2-Dilinoleyl-4-dimethylaminoethyl-[1,3]- | XTC/DSPC/Cholesterol/PEG-DMG |
| | dioxolane (XTC) | 57.5/7.5/31.5/3.5 |
| | | lipid:siRNA~6:1 |
| LNP06 | 2,2-Dilinoleyl-4-dimethylaminoethyl-[1,3]- | XTC/DSPC/Cholesterol/PEG-DMG |
| | dioxolane (XTC) | 57.5/7.5/31.5/3.5 |
| | | lipid:siRNA~11:1 |
| LNP07 | 2,2-Dilinoleyl-4-dimethylaminoethyl-[1,3]- | XTC/DSPC/Cholesterol/PEG-DMG |
| | dioxolane (XTC) | 60/7.5/31/1.5, |
| | | lipid:siRNA~6:1 |
| LNP08 | 2,2-Dilinoleyl-4-dimethylaminoethyl-[1,3]- | XTC/DSPC/Cholesterol/PEG-DMG |
| | dioxolane (XTC) | 60/7.5/31/1.5, |
| | | lipid:siRNA~11:1 |
| LNP09 | 2,2-Dilinoleyl-4-dimethylaminoethyl-[1,3]- | XTC/DSPC/Cholesterol/PEG-DMG |
| | dioxolane (XTC) | 50/10/38.5/1.5 |
| | | Lipid:siRNA 10:1 |
| LNP10 | (3aR,5s,6aS)-N,N-dimethyl-2,2- | ALN100/DSPC/Cholesterol/PEG- |
| | di((9Z, 12Z)-octadeca-9,12- | DMG |
| | dienyl)tetrahydro-3aH- | 50/10/38.5/1.5 |
| | cyclopenta[d][1,3]dioxol-5-amine | Lipid:siRNA 10:1 |
| | (ALN100) | |
| LNP11 | (6Z, 9Z, 28Z, 31Z)-heptatriaconta-6,9,28,31- | MC-3/DSPC/Cholesterol/PEG-DMG |
| | tetraen-19-yl 4-(dimethylamino)butanoate | 50/10/38.5/1.5 |
| | (MC3) | Lipid:siRNA 10:1 |
| LNP12 | 1,1′-(2-(4-(2-((2-(bis(2- | Tech G1/DSPC/Cholesterol/PEG- |
| | hydroxydodecyl)amino)ethyl)(2- | DMG |
| | hydroxydodecyl)amino)ethyl)piperazin-1- | 50/10/38.5/1.5 |
| | yl)ethylazanediyl)didodecan-2-ol (Tech | Lipid:siRNA 10:1 |
| | G1) | |
| LNP13 | XTC | XTC/DSPC/Chol/PEG-DMG |
| | | 50/10/38.5/1.5 |
| | | Lipid:siRNA:33:1 |
| LNP14 | MC3 | MC3/DSPC/Chol/PEG-DMG |
| | | 40/15/40/5 |
| | | Lipid:siRNA:11:1 |
| LNP15 | MC3 | MC3/DSPC/Chol/PEG-DSG/GalNAc- |
| | | PEG-DSG |
| | | 50/10/35/4.5/0.5 |
| | | Lipid:siRNA:11:1 |
| LNP16 | MC3 | MC3/DSPC/Chol/PEG-DMG |
| | | 50/10/38.5/1.5 |
| | | Lipid:siRNA:7:1 |
| LNP17 | MC3 | MC3/DSPC/Chol/PEG-DSG |
| | | 50/10/38.5/1.5 |
| | | Lipid:siRNA:10:1 |
| LNP18 | MC3 | MC3/DSPC/Chol/PEG-DMG |
| | | 50/10/38.5/1.5 |
| | | Lipid:siRNA:12:1 |
| LNP19 | MC3 | MC3/DSPC/Chol/PEG-DMG |
| | | 50/10/35/5 |
| | | Lipid:siRNA:8:1 |
| LNP20 | MC3 | MC3/DSPC/Chol/PEG-DPG |
| | | 50/10/38.5/1.5 |
| | | Lipid:siRNA:10:1 |
| LNP21 | C12-200 | C12-200/DSPC/Chol/PEG-DSG |
| | | 50/10/38.5/1.5 |
| | | Lipid:siRNA:7:1 |
| LNP22 | XTC | XTC/DSPC/Chol/PEG-DSG |
| | | 50/10/38.5/1.5 |
| | | Lipid:siRNA:10:1 |

DSPC: distearoylphosphatidylcholine; DPPC: dipalmitoylphosphatidylcholine; PEG-DMG: PEG-didimyristoyl glycerol (C14-PEG, or PEG-C14) (PEG with avg mol wt of 2000); PEG-DSG: PEG-distyryl glycerol (C18-PEG, or PEG-C18) (PEG with avg mol wt of 2000); PEG-cDMA: PEG-carbamoyl-1,2-dimyristyloxypropylamine (PEG with avg mol wt of 2000) and SNALP (1,2-Dilinolenyloxy-N,N-dimethylaminopropane (DLinDMA)) comprising formulations are described in WO 2009/127060, which is hereby incorporated by reference.

[0656] XTC comprising formulations are described in WO 2010/088537, the entire contents of which are hereby incorporated herein by reference.

MC3 comprising formulations are described, e.g., in United States Patent Publication No. 2010/0324120, the entire contents of which are hereby incorporated by reference.

[0657] ALNY-100 comprising formulations are described in WO 2010/054406, the entire contents of which are hereby incorporated herein by reference.

[0658] C12-200 comprising formulations are described in WO 2010/129709, the entire contents of which are hereby incorporated herein by reference.

[0659] Compositions and formulations for oral administration include powders or granules, microparticulates, nanoparticulates, suspensions or solutions in water or non-aqueous media, capsules, gel capsules, sachets, tablets or minitablets. Thickeners, flavoring agents, diluents, emulsifiers, dispersing aids or binders can be desirable. In some embodiments, oral formulations are those in which dsRNAs featured in the disclosure are administered in conjunction with one or more penetration enhancer surfactants and chelators. Suitable surfactants include fatty acids or esters or salts thereof, bile acids or salts thereof. Suitable bile acids/salts include chenodeoxycholic acid (CDCA) and ursodeoxychenodeoxycholic acid (UDCA), cholic acid, dehydrocholic acid, deoxycholic acid, glucholic acid, glycholic acid, glycodeoxycholic acid, taurocholic acid, taurodeoxycholic acid, sodium tauro-24,25-dihydro-fusidate and sodium glycodihydrofusidate. Suitable fatty acids include arachidonic acid, undecanoic acid, oleic acid, lauric acid, caprylic acid, capric acid, myristic acid, palmitic acid, stearic acid, linoleic acid, linolenic acid, dicaprate, tricaprate, monoolein, dilaurin, glyceryl 1-monocaprate, 1-dodecylazacycloheptan-2-one, an acylcarnitine, an acylcholine, or a monoglyceride, a diglyceride or a pharmaceutically acceptable salt thereof (e.g., sodium). In some embodiments, combinations of penetration enhancers are used, for example, fatty acids/salts in combination with bile acids/salts. One exemplary combination is the sodium salt of lauric acid, capric acid and UDCA. Further penetration enhancers include polyoxyethylene-9-lauryl ether, polyoxyethylene-20-cetyl ether. DsRNAs featured in the disclosure can be delivered orally, in granular form including sprayed dried particles, or complexed to form micro or nanoparticles. DsRNA complexing agents include poly-amino acids; polyimines; polyacrylates; polyalkylacrylates, polyoxethanes, polyalkylcyanoacrylates; cationized gelatins, albumins, starches, acrylates, polyethyleneglycols (PEG) and starches; polyalkylcyanoacrylates; DEAE-derivatized polyimines, pollulans, celluloses and starches. Suitable complexing agents include chitosan, N-trimethylchitosan, poly-L-lysine, polyhistidine, polyornithine, polyspermines, protamine, polyvinylpyridine, polythiodiethylaminomethylethylene P(TDAE), polyaminostyrene (e.g., p-amino), poly(methylcyanoacrylate), poly(ethylcyanoacrylate), poly(butylcyanoacrylate), poly(isobutylcyanoacrylate), poly(isohexylcynaoacrylate), DEAE-methacrylate, DEAE-hexylacrylate, DEAE-acrylamide, DEAE-albumin and DEAE-dextran, polymethylacrylate, polyhexylacrylate, poly(D,L-lactic acid), poly(DL-lactic-co-glycolic acid (PLGA), alginate, and polyethyleneglycol (PEG). Oral formulations for dsRNAs and their preparation are described in detail in U.S. Pat. No. 6,887,906, U.S. 2003/0027780, and U.S. Pat. No. 6,747,014, each of which is incorporated herein by reference.

[0660] Compositions and formulations for parenteral, intraparenchymal (into the brain), intrathecal, intraventricular or intrahepatic administration can include sterile aqueous solutions which can also contain buffers, diluents and other suitable additives such as, but not limited to, penetration enhancers, carrier compounds and other pharmaceutically acceptable carriers or excipients.

[0661] Pharmaceutical compositions of the present disclosure include, but are not limited to, solutions, emulsions, and liposome-containing formulations. These compositions can be generated from a variety of components that include, but are not limited to, preformed liquids, self-emulsifying solids and self-emulsifying semisolids. Particularly preferred are formulations that target the brain when treating MAPT associated diseases or disorders.

[0662] The pharmaceutical formulations of the present disclosure, which can conveniently be presented in unit dosage form, can be prepared according to conventional techniques well known in the pharmaceutical industry. Such techniques include the step of bringing into association the active ingredients with the pharmaceutical carrier(s) or excipient(s). In general, the formulations are prepared by uniformly and intimately bringing into association the active ingredients with liquid carriers or finely divided solid carriers or both, and then, if necessary, shaping the product.

[0663] The compositions of the present disclosure can be formulated into any of many possible dosage forms such as, but not limited to, tablets, capsules, gel capsules, liquid syrups, soft gels, suppositories, and enemas. The compositions of the present disclosure can also be formulated as suspensions in aqueous, non-aqueous or mixed media. Aqueous suspensions can further contain substances which increase the viscosity of the suspension including, for example, sodium carboxymethylcellulose, sorbitol or dextran. The suspension can also contain stabilizers.

[0664] C. Additional Formulations

[0665] i. Emulsions

[0666] The compositions of the present disclosure can be prepared and formulated as emulsions. Emulsions are typically heterogeneous systems of one liquid dispersed in another in the form of droplets usually exceeding 0.1 m in diameter (see e.g., Ansel's Pharmaceutical Dosage Forms and Drug Delivery Systems, Allen, L V., Popovich N G., and Ansel H C., 2004, Lippincott Williams & Wilkins (8th ed.), New York, N.Y.; Idson, in Pharmaceutical Dosage Forms, Lieberman, Rieger and Banker (Eds.), 1988, Marcel Dekker, Inc., New York, N.Y., volume 1, p. 199; Rosoff, in Pharmaceutical Dosage Forms, Lieberman, Rieger and Banker (Eds.), 1988, Marcel Dekker, Inc., New York, N.Y., Volume 1, p. 245; Block in Pharmaceutical Dosage Forms, Lieberman, Rieger and Banker (Eds.), 1988, Marcel Dekker, Inc., New York, N.Y., volume 2, p. 335; Higuchi et al., in Remington's Pharmaceutical Sciences, Mack Publishing Co., Easton, Pa., 1985, p. 301). Emulsions are often biphasic systems comprising two immiscible liquid phases intimately mixed and dispersed with each other. In general, emulsions can be of either the water-in-oil (w/o) or the oil-in-water (o/w) variety. When an aqueous phase is finely divided into and dispersed as minute droplets into a bulk oily phase, the resulting composition is called a water-in-oil (w/o) emulsion. Alternatively, when an oily phase is finely divided into and dispersed as minute droplets into a bulk aqueous phase, the resulting composition is called an oil-in-water (o/w) emulsion. Emulsions can contain additional components in addition to the dispersed phases, and the active drug which can be present as a solution in either aqueous phase, oily phase or itself as a separate phase. Pharmaceutical excipients such as emulsifiers, stabilizers, dyes, and anti-oxidants can also be present in emulsions as needed. Pharmaceutical emulsions can also be multiple emulsions that are comprised of more than two phases such as, for example, in the case of oil-in-water-in-oil (o/w/o) and water-in-oil-in-water (w/o/w) emulsions. Such complex formulations often provide certain advantages that simple binary emulsions do not. Multiple emulsions in which individual oil droplets of an o/w emulsion enclose small water droplets constitute a w/o/w emulsion. Likewise, a system of oil droplets enclosed in globules of water stabilized in an oily continuous phase provides an o/w/o emulsion.

[0667] Emulsions are characterized by little or no thermodynamic stability. Often, the dispersed or discontinuous phase of the emulsion is well dispersed into the external or continuous phase and maintained in this form through the means of emulsifiers or the viscosity of the formulation. Either of the phases of the emulsion can be a semisolid or a solid, as is the case of emulsion-style ointment bases and creams. Other means of stabilizing emulsions entail the use of emulsifiers that can be incorporated into either phase of the emulsion. Emulsifiers can broadly be classified into four categories: synthetic surfactants, naturally occurring emulsifiers, absorption bases, and finely dispersed solids (see e.g., Ansel's Pharmaceutical Dosage Forms and Drug Delivery Systems, Allen, L V., Popovich N G., and Ansel H C., 2004, Lippincott Williams & Wilkins (8th ed.), New York, N.Y.; Idson, in Pharmaceutical Dosage Forms, Lieberman, Rieger and Banker (Eds.), 1988, Marcel Dekker, Inc., New York, N.Y., volume 1, p. 199).

[0668] Synthetic surfactants, also known as surface active agents, have found wide applicability in the formulation of emulsions and have been reviewed in the literature (see e.g., Ansel's Pharmaceutical Dosage Forms and Drug Delivery Systems, Allen, L V., Popovich N G., and Ansel H C., 2004, Lippincott Williams & Wilkins (8th ed.), New York, N.Y.; Rieger, in Pharmaceutical Dosage Forms, Lieberman, Rieger and Banker (Eds.), 1988, Marcel Dekker, Inc., New York, N.Y., volume 1, p. 285; Idson, in Pharmaceutical Dosage Forms, Lieberman, Rieger and Banker (Eds.), Marcel Dekker, Inc., New York, N.Y., 1988, volume 1, p. 199). Surfactants are typically amphiphilic and comprise a hydrophilic and a hydrophobic portion. The ratio of the hydrophilic to the hydrophobic nature of the surfactant has been termed the hydrophile/lipophile balance (HLB) and is a valuable tool in categorizing and selecting surfactants in the preparation of formulations. Surfactants can be classified into different classes based on the nature of the hydrophilic group: nonionic, anionic, cationic and amphoteric (see e.g., Ansel's Pharmaceutical Dosage Forms and Drug Delivery Systems, Allen, L V., Popovich N G., and Ansel H C., 2004, Lippincott Williams & Wilkins (8th ed.), New York, N.Y. Rieger, in Pharmaceutical Dosage Forms, Lieberman, Rieger and Banker (Eds.), 1988, Marcel Dekker, Inc., New York, N.Y., volume 1, p. 285).

[0669] Naturally occurring emulsifiers used in emulsion formulations include lanolin, beeswax, phosphatides, lecithin and acacia. Absorption bases possess hydrophilic properties such that they can soak up water to form w/o emulsions yet retain their semisolid consistencies, such as anhydrous lanolin and hydrophilic petrolatum. Finely divided solids have also been used as good emulsifiers especially in combination with surfactants and in viscous preparations. These include polar inorganic solids, such as heavy metal hydroxides, nonswelling clays such as bentonite, attapulgite, hectorite, kaolin, montmorillonite, colloidal aluminum silicate and colloidal magnesium aluminum silicate, pigments and nonpolar solids such as carbon or glyceryl tristearate.

[0670] A large variety of non-emulsifying materials are also included in emulsion formulations and contribute to the properties of emulsions. These include fats, oils, waxes, fatty acids, fatty alcohols, fatty esters, humectants, hydrophilic colloids, preservatives and antioxidants (Block, in Pharmaceutical Dosage Forms, Lieberman, Rieger and Banker (Eds.), 1988, Marcel Dekker, Inc., New York, N.Y., volume 1, p. 335; Idson, in Pharmaceutical Dosage Forms, Lieberman, Rieger and Banker (Eds.), 1988, Marcel Dekker, Inc., New York, N.Y., volume 1, p. 199).

[0671] Hydrophilic colloids or hydrocolloids include naturally occurring gums and synthetic polymers such as polysaccharides (for example, acacia, agar, alginic acid, carrageenan, guar gum, karaya gum, and tragacanth), cellulose derivatives (for example, carboxymethylcellulose and carboxypropylcellulose), and synthetic polymers (for example, carbomers, cellulose ethers, and carboxyvinyl polymers). These disperse or swell in water to form colloidal solutions that stabilize emulsions by forming strong interfacial films around the dispersed-phase droplets and by increasing the viscosity of the external phase.

[0672] Since emulsions often contain a number of ingredients such as carbohydrates, proteins, sterols and phosphatides that can readily support the growth of microbes, these formulations often incorporate preservatives. Commonly used preservatives included in emulsion formulations include methyl paraben, propyl paraben, quaternary ammonium salts, benzalkonium chloride, esters of p-hydroxybenzoic acid, and boric acid. Antioxidants are also commonly added to emulsion formulations to prevent deterioration of the formulation. Antioxidants used can be free radical scavengers such as tocopherols, alkyl gallates, butylated hydroxyanisole, butylated hydroxytoluene, or reducing agents such as ascorbic acid and sodium metabisulfite, and antioxidant synergists such as citric acid, tartaric acid, and lecithin.

[0673] The application of emulsion formulations via dermatological, oral and parenteral routes and methods for their manufacture have been reviewed in the literature (see e.g., Ansel's Pharmaceutical Dosage Forms and Drug Delivery Systems, Allen, L V., Popovich N G., and Ansel H C., 2004, Lippincott Williams & Wilkins (8th ed.), New York, N.Y.; Idson, in Pharmaceutical Dosage Forms, Lieberman, Rieger and Banker (Eds.), 1988, Marcel Dekker, Inc., New York, N.Y., volume 1, p. 199). Emulsion formulations for oral delivery have been very widely used because of ease of formulation, as well as efficacy from an absorption and bioavailability standpoint (see e.g., Ansel's Pharmaceutical Dosage Forms and Drug Delivery Systems, Allen, L V., Popovich N G., and Ansel H C., 2004, Lippincott Williams & Wilkins (8th ed.), New York, N.Y.; Rosoff, in Pharmaceutical Dosage Forms, Lieberman, Rieger and Banker (Eds.), 1988, Marcel Dekker, Inc., New York, N.Y., volume 1, p. 245; Idson, in Pharmaceutical Dosage Forms, Lieberman, Rieger and Banker (Eds.), 1988, Marcel Dekker, Inc., New York, N.Y., volume 1, p. 199). Mineral-oil base laxatives, oil-soluble vitamins and high fat nutritive preparations are among the materials that have commonly been administered orally as o/w emulsions.

[0674] ii. Microemulsions

[0675] In one embodiment of the present disclosure, the compositions of RNAi agents and nucleic acids are formulated as microemulsions. A microemulsion can be defined as a system of water, oil and amphiphile which is a single optically isotropic and thermodynamically stable liquid solution (see e.g., Ansel's Pharmaceutical Dosage Forms and Drug Delivery Systems, Allen, L V., Popovich N G., and Ansel H C., 2004, Lippincott Williams & Wilkins (8th ed.), New York, N.Y.; Rosoff, in Pharmaceutical Dosage Forms, Lieberman, Rieger and Banker (Eds.), 1988, Marcel Dekker, Inc., New York, N.Y., volume 1, p. 245). Typically, microemulsions are systems that are prepared by first dispersing an oil in an aqueous surfactant solution and then adding a sufficient amount of a fourth component, generally an intermediate chain-length alcohol to form a transparent system. Therefore, microemulsions have also been described as thermodynamically stable, isotropically clear dispersions of two immiscible liquids that are stabilized by interfacial films of surface-active molecules (Leung and Shah, in: Controlled Release of Drugs: Polymers and Aggregate Systems, Rosoff, M., Ed., 1989, VCH Publishers, New York, pages 185-215). Microemulsions commonly are prepared via a combination of three to five components that include oil, water, surfactant, cosurfactant and electrolyte. Whether the microemulsion is of the water-in-oil (w/o) or an oil-in-water (o/w) type is dependent on the properties of the oil and surfactant used, and on the structure and geometric packing of the polar heads and hydrocarbon tails of the surfactant molecules (Schott, in Remington's Pharmaceutical Sciences, Mack Publishing Co., Easton, Pa., 1985, p. 271).

[0676] The phenomenological approach utilizing phase diagrams has been extensively studied and has yielded a comprehensive knowledge, to one skilled in the art, of how to formulate microemulsions (see e.g., Ansel's Pharmaceutical Dosage Forms and Drug Delivery Systems, Allen, L V., Popovich N G., and Ansel H C., 2004, Lippincott Williams & Wilkins (8th ed.), New York, N.Y.; Rosoff, in Pharmaceutical Dosage Forms, Lieberman, Rieger and Banker (Eds.), 1988, Marcel Dekker, Inc., New York, N.Y., volume 1, p. 245; Block, in Pharmaceutical Dosage Forms, Lieberman, Rieger and Banker (Eds.), 1988, Marcel Dekker, Inc., New York, N.Y., volume 1, p. 335). Compared to conventional emulsions, microemulsions offer the advantage of solubilizing water-insoluble drugs in a formulation of thermodynamically stable droplets that are formed spontaneously.

[0677] Surfactants used in the preparation of microemulsions include, but are not limited to, ionic surfactants, non-ionic surfactants, Brij 96, polyoxyethylene oleyl ethers, polyglycerol fatty acid esters, tetraglycerol monolaurate (ML310), tetraglycerol monooleate (MO310), hexaglycerol monooleate (PO310), hexaglycerol pentaoleate (PO500), decaglycerol monocaprate (MCA750), decaglycerol monooleate (MO750), decaglycerol sequioleate (SO750), decaglycerol decaoleate (DA0750), alone or in combination with cosurfactants. The cosurfactant, usually a short-chain alcohol such as ethanol, 1-propanol, and 1-butanol, serves to increase the interfacial fluidity by penetrating into the surfactant film and consequently creating a disordered film because of the void space generated among surfactant molecules. Microemulsions can, however, be prepared without the use of cosurfactants and alcohol-free self-emulsifying microemulsion systems are known in the art. The aqueous phase can typically be, but is not limited to, water, an aqueous solution of the drug, glycerol, PEG300, PEG400, polyglycerols, propylene glycols, and derivatives of ethylene glycol. The oil phase can include, but is not limited to, materials such as Captex 300, Captex 355, Capmul MCM, fatty acid esters, medium chain (C8-C12) mono, di, and tri-glycerides, polyoxyethylated glyceryl fatty acid esters, fatty alcohols, polyglycolized glycerides, saturated polyglycolized C8-C10 glycerides, vegetable oils and silicone oil.

[0678] Microemulsions are particularly of interest from the standpoint of drug solubilization and the enhanced absorption of drugs. Lipid based microemulsions (both o/w and w/o) have been proposed to enhance the oral bioavailability of drugs, including peptides (see e.g., U.S. Pat. Nos. 6,191,105; 7,063,860; 7,070,802; 7,157,099; Constantinides et al., Pharmaceutical Research, 1994, 11, 1385-1390; Ritschel, Meth. Find. Exp. Clin. Pharmacol., 1993, 13, 205). Microemulsions afford advantages of improved drug solubilization, protection of drug from enzymatic hydrolysis, possible enhancement of drug absorption due to surfactant-induced alterations in membrane fluidity and permeability, ease of preparation, ease of oral administration over solid dosage forms, improved clinical potency, and decreased toxicity (see e.g., U.S. Pat. Nos. 6,191,105; 7,063,860; 7,070,802; 7,157,099; Constantinides et al., Pharmaceutical Research, 1994, 11, 1385; Ho et al., J. Pharm. Sci., 1996, 85, 138-143). Often microemulsions can form spontaneously when their components are brought together at ambient temperature. This can be particularly advantageous when formulating thermolabile drugs, peptides or RNAi agents. Microemulsions have also been effective in the transdermal delivery of active components in both cosmetic and pharmaceutical applications. It is expected that the microemulsion compositions and formulations of the present disclosure will facilitate the increased systemic absorption of RNAi agents and nucleic acids from the gastrointestinal tract, as well as improve the local cellular uptake of RNAi agents and nucleic acids.

[0679] Microemulsions of the present disclosure can also contain additional components and additives such as sorbitan monostearate (Grill 3), Labrasol, and penetration enhancers to improve the properties of the formulation and to enhance the absorption of the RNAi agents and nucleic acids of the present disclosure. Penetration enhancers used in the microemulsions of the present disclosure can be classified as belonging to one of five broad categories—surfactants, fatty acids, bile salts, chelating agents, and non-chelating non-surfactants (Lee et al., Critical Reviews in Therapeutic Drug Carrier Systems, 1991, p. 92). Each of these classes has been discussed above.

[0680] iii. Microparticles

[0681] An RNAi agent of the disclosure may be incorporated into a particle, e.g., a microparticle. Microparticles can be produced by spray-drying, but may also be produced by other methods including lyophilization, evaporation, fluid bed drying, vacuum drying, or a combination of these techniques.

[0682] iv. Penetration Enhancers

[0683] In one embodiment, the present disclosure employs various penetration enhancers to effect the efficient delivery of nucleic acids, particularly RNAi agents, to the skin of animals. Most drugs are present in solution in both ionized and nonionized forms. However, usually only lipid soluble or lipophilic drugs readily cross cell membranes. It has been discovered that even non-lipophilic drugs can cross cell membranes if the membrane to be crossed is treated with a penetration enhancer. In addition to aiding the diffusion of non-lipophilic drugs across cell membranes, penetration enhancers also enhance the permeability of lipophilic drugs.

[0684] Penetration enhancers can be classified as belonging to one of five broad categories, i.e., surfactants, fatty acids, bile salts, chelating agents, and non-chelating non-surfactants (see e.g., Malmsten, M. Surfactants and polymers in drug delivery, Informa Health Care, New York, N.Y., 2002; Lee et al., Critical Reviews in Therapeutic Drug Carrier Systems, 1991, p.92). Each of the above mentioned classes of penetration enhancers are described below in greater detail.

[0685] Surfactants (or “surface-active agents”) are chemical entities which, when dissolved in an aqueous solution, reduce the surface tension of the solution or the interfacial tension between the aqueous solution and another liquid, with the result that absorption of RNAi agents through the mucosa is enhanced. In addition to bile salts and fatty acids, these penetration enhancers include, for example, sodium lauryl sulfate, polyoxyethylene-9-lauryl ether and polyoxyethylene-20-cetyl ether) (see e.g., Malmsten, M. Surfactants and polymers in drug delivery, Informa Health Care, New York, N.Y., 2002; Lee et al., Critical Reviews in Therapeutic Drug Carrier Systems, 1991, p.92); and perfluorochemical emulsions, such as FC-43. Takahashi et al., J. Pharm. Pharmacol., 1988, 40, 252).

[0686] Various fatty acids and their derivatives which act as penetration enhancers include, for example, oleic acid, lauric acid, capric acid (n-decanoic acid), myristic acid, palmitic acid, stearic acid, linoleic acid, linolenic acid, dicaprate, tricaprate, monoolein (1-monooleoyl-rac-glycerol), dilaurin, caprylic acid, arachidonic acid, glycerol 1-monocaprate, 1-dodecylazacycloheptan-2-one, acylcarnitines, acylcholines, C₁₋₂₀ alkyl esters thereof (e.g., methyl, isopropyl and t-butyl), and mono- and di-glycerides thereof (i.e., oleate, laurate, caprate, myristate, palmitate, stearate, linoleate, etc.) (see e.g., Touitou, E., et al. Enhancement in Drug Delivery, CRC Press, Danvers, Mass., 2006; Lee et al., Critical Reviews in Therapeutic Drug Carrier Systems, 1991, p.92; Muranishi, Critical Reviews in Therapeutic Drug Carrier Systems, 1990, 7, 1-33; El Hariri et al., J. Pharm. Pharmacol., 1992, 44, 651-654).

[0687] The physiological role of bile includes the facilitation of dispersion and absorption of lipids and fat-soluble vitamins (see e.g., Malmsten, M. Surfactants and polymers in drug delivery, Informa Health Care, New York, N.Y., 2002; Brunton, Chapter 38 in: Goodman & Gilman's The Pharmacological Basis of Therapeutics, 9th Ed., Hardman et al. Eds., McGraw-Hill, New York, 1996, pp. 934-935). Various natural bile salts, and their synthetic derivatives, act as penetration enhancers. Thus the term “bile salts” includes any of the naturally occurring components of bile as well as any of their synthetic derivatives. Suitable bile salts include, for example, cholic acid (or its pharmaceutically acceptable sodium salt, sodium cholate), dehydrocholic acid (sodium dehydrocholate), deoxycholic acid (sodium deoxycholate), glucholic acid (sodium glucholate), glycholic acid (sodium glycocholate), glycodeoxycholic acid (sodium glycodeoxycholate), taurocholic acid (sodium taurocholate), taurodeoxycholic acid (sodium taurodeoxycholate), chenodeoxycholic acid (sodium chenodeoxycholate), ursodeoxycholic acid (UDCA), sodium tauro-24,25-dihydro-fusidate (STDHF), sodium glycodihydrofusidate and polyoxyethylene-9-lauryl ether (POE) (see e.g., Malmsten, M. Surfactants and polymers in drug delivery, Informa Health Care, New York, N.Y., 2002; Lee et al., Critical Reviews in Therapeutic Drug Carrier Systems, 1991, page 92; Swinyard, Chapter 39 In: Remington's Pharmaceutical Sciences, 18th Ed., Gennaro, ed., Mack Publishing Co., Easton, Pa., 1990, pages 782-783; Muranishi, Critical Reviews in Therapeutic Drug Carrier Systems, 1990, 7, 1-33; Yamamoto et al., J. Pharm. Exp. Ther., 1992, 263, 25; Yamashita et al., J. Pharm. Sci., 1990, 79, 579-583).

[0688] Chelating agents, as used in connection with the present disclosure, can be defined as compounds that remove metallic ions from solution by forming complexes therewith, with the result that absorption of RNAi agents through the mucosa is enhanced. With regards to their use as penetration enhancers in the present disclosure, chelating agents have the added advantage of also serving as DNase inhibitors, as most characterized DNA nucleases require a divalent metal ion for catalysis and are thus inhibited by chelating agents (Jarrett, J. Chromatogr., 1993, 618, 315-339). Suitable chelating agents include but are not limited to disodium ethylenediaminetetraacetate (EDTA), citric acid, salicylates (e.g., sodium salicylate, 5-methoxysalicylate and homovanilate), N-acyl derivatives of collagen, laureth-9 and N-amino acyl derivatives of beta-diketones (enamines)(see e.g., Katdare, A. et al., Excipient development for pharmaceutical, biotechnology, and drug delivery, CRC Press, Danvers, Mass., 2006; Lee et al., Critical Reviews in Therapeutic Drug Carrier Systems, 1991, page 92; Muranishi, Critical Reviews in Therapeutic Drug Carrier Systems, 1990, 7, 1-33; Buur et al., J. Control Rel., 1990, 14, 43-51).

[0689] As used herein, non-chelating non-surfactant penetration enhancing compounds can be defined as compounds that demonstrate insignificant activity as chelating agents or as surfactants but that nonetheless enhance absorption of RNAi agents through the alimentary mucosa (see e.g., Muranishi, Critical Reviews in Therapeutic Drug Carrier Systems, 1990, 7, 1-33). This class of penetration enhancers includes, for example, unsaturated cyclic ureas, 1-alkyl- and 1-alkenylazacyclo-alkanone derivatives (Lee et al., Critical Reviews in Therapeutic Drug Carrier Systems, 1991, page 92); and non-steroidal anti-inflammatory agents such as diclofenac sodium, indomethacin and phenylbutazone (Yamashita et al., J. Pharm. Pharmacol., 1987, 39, 621-626).

[0690] Agents that enhance uptake of RNAi agents at the cellular level can also be added to the pharmaceutical and other compositions of the present disclosure. For example, cationic lipids, such as lipofectin (Junichi et al, U.S. Pat. No. 5,705,188), cationic glycerol derivatives, and polycationic molecules, such as polylysine (WO 97/30731), are also known to enhance the cellular uptake of dsRNAs.

[0691] Other agents can be utilized to enhance the penetration of the administered nucleic acids, including glycols such as ethylene glycol and propylene glycol, pyrrols such as 2-pyrrol, azones, and terpenes such as limonene and menthone.

[0692] v. Excipients

[0693] In contrast to a carrier compound, a “pharmaceutical carrier” or “excipient” is a pharmaceutically acceptable solvent, suspending agent or any other pharmacologically inert vehicle for delivering one or more nucleic acids to an animal. The excipient can be liquid or solid and is selected, with the planned manner of administration in mind, so as to provide for the desired bulk, consistency, etc., when combined with a nucleic acid and the other components of a given pharmaceutical composition. Typical pharmaceutical carriers include, but are not limited to, binding agents (e.g., pregelatinized maize starch, polyvinylpyrrolidone or hydroxypropyl methylcellulose, etc.); fillers (e.g., lactose and other sugars, microcrystalline cellulose, pectin, gelatin, calcium sulfate, ethyl cellulose, polyacrylates or calcium hydrogen phosphate, etc.); lubricants (e.g., magnesium stearate, talc, silica, colloidal silicon dioxide, stearic acid, metallic stearates, hydrogenated vegetable oils, corn starch, polyethylene glycols, sodium benzoate, sodium acetate, etc.); disintegrants (e.g., starch, sodium starch glycolate, etc.); and wetting agents (e.g., sodium lauryl sulphate, etc).

[0694] Pharmaceutically acceptable organic or inorganic excipients suitable for non-parenteral administration which do not deleteriously react with nucleic acids can also be used to formulate the compositions of the present disclosure. Suitable pharmaceutically acceptable carriers include, but are not limited to, water, salt solutions, alcohols, polyethylene glycols, gelatin, lactose, amylose, magnesium stearate, talc, silicic acid, viscous paraffin, hydroxymethylcellulose, polyvinylpyrrolidone and the like.

[0695] Formulations for topical administration of nucleic acids can include sterile and non-sterile aqueous solutions, non-aqueous solutions in common solvents such as alcohols, or solutions of the nucleic acids in liquid or solid oil bases. The solutions can also contain buffers, diluents and other suitable additives. Pharmaceutically acceptable organic or inorganic excipients suitable for non-parenteral administration which do not deleteriously react with nucleic acids can be used.

[0696] Suitable pharmaceutically acceptable excipients include, but are not limited to, water, salt solutions, alcohol, polyethylene glycols, gelatin, lactose, amylose, magnesium stearate, talc, silicic acid, viscous paraffin, hydroxymethylcellulose, polyvinylpyrrolidone and the like.

[0697] vi. Other Components

[0698] The compositions of the present disclosure can additionally contain other adjunct components conventionally found in pharmaceutical compositions, at their art-established usage levels. Thus, for example, the compositions can contain additional, compatible, pharmaceutically-active materials such as, for example, antipruritics, astringents, local anesthetics or anti-inflammatory agents, or can contain additional materials useful in physically formulating various dosage forms of the compositions of the present disclosure, such as dyes, flavoring agents, preservatives, antioxidants, opacifiers, thickening agents and stabilizers. However, such materials, when added, should not unduly interfere with the biological activities of the components of the compositions of the present disclosure. The formulations can be sterilized and, if desired, mixed with auxiliary agents, e.g., lubricants, preservatives, stabilizers, wetting agents, emulsifiers, salts for influencing osmotic pressure, buffers, colorings, flavorings or aromatic substances and the like which do not deleteriously interact with the nucleic acid(s) of the formulation.

[0699] Aqueous suspensions can contain substances which increase the viscosity of the suspension including, for example, sodium carboxymethylcellulose, sorbitol or dextran. The suspension can also contain stabilizers.

[0700] In some embodiments, pharmaceutical compositions featured in the disclosure include (a) one or more RNAi agents and (b) one or more agents which function by a non-RNAi mechanism and which are useful in treating a MAPT-associated disorder. Examples of such agents include, but are not lmited to, cholinesterase inhibitors, memantine, monoamine inhibitors, reserpine, anticonvulsants, antipsychotic agents, and antidepressants.

[0701] Toxicity and therapeutic efficacy of such compounds can be determined by standard pharmaceutical procedures in cell cultures or experimental animals, e.g., for determining the LD₅₀ (the dose lethal to 50% of the population) and the ED₅₀ (the dose therapeutically effective in 50% of the population). The dose ratio between toxic and therapeutic effects is the therapeutic index and it can be expressed as the ratio LD₅₀/ED₅₀. Compounds that exhibit high therapeutic indices are preferred.

[0702] The data obtained from cell culture assays and animal studies can be used in formulating a range of dosage for use in humans. The dosage of compositions featured herein in the disclosure lies generally within a range of circulating concentrations that include the ED₅₀ with little or no toxicity. The dosage can vary within this range depending upon the dosage form employed and the route of administration utilized. For any compound used in the methods featured in the disclosure, the therapeutically effective dose can be estimated initially from cell culture assays. A dose can be formulated in animal models to achieve a circulating plasma concentration range of the compound or, when appropriate, of the polypeptide product of a target sequence (e.g., achieving a decreased concentration of the polypeptide) that includes the IC₅₀ (i.e., the concentration of the test compound which achieves a half-maximal inhibition of symptoms) as determined in cell culture. Such information can be used to more accurately determine useful doses in humans. Levels in plasma can be measured, for example, by high performance liquid chromatography.

[0703] In addition to their administration, as discussed above, the RNAi agents featured in the disclosure can be administered in combination with other known agents effective in treatment of pathological processes mediated by nucleotide repeat expression. In any event, the administering physician can adjust the amount and timing of RNAi agent administration on the basis of results observed using standard measures of efficacy known in the art or described herein.

### VII. Kits

[0704] In certain aspects, the instant disclosure provides kits that include a suitable container containing a pharmaceutical formulation of a siRNA compound, e.g., a double-stranded siRNA compound, or ssiRNA compound, (e.g., a precursor, e.g., a larger siRNA compound which can be processed into a ssiRNA compound, or a DNA which encodes an siRNA compound, e.g., a double-stranded siRNA compound, or ssiRNA compound, or precursor thereof).

[0705] Such kits include one or more dsRNA agent(s) and instructions for use, e.g., instructions for administering a prophylactically or therapeutically effective amount of a dsRNA agent(s). The dsRNA agent may be in a vial or a pre-filled syringe. The kits may optionally further comprise means for administering the dsRNA agent (e.g., an injection device, such as a pre-filled syringe or an intrathecal pump), or means for measuring the inhibition of MAPT (e.g., means for measuring the inhibition of MAPT mRNA, Tau, and/or MAPT activity). Such means for measuring the inhibition of MAPT may comprise a means for obtaining a sample from a subject, such as, e.g., a CSF and/or plasma sample. The kits of the invention may optionally further comprise means for determining the therapeutically effective or prophylactically effective amount.

[0706] In certain embodiments the individual components of the pharmaceutical formulation may be provided in one container. Alternatively, it may be desirable to provide the components of the pharmaceutical formulation separately in two or more containers, e.g., one container for a siRNA compound preparation, and at least another for a carrier compound. The kit may be packaged in a number of different configurations such as one or more containers in a single box. The different components can be combined, e.g., according to instructions provided with the kit. The components can be combined according to a method described herein, e.g., to prepare and administer a pharmaceutical composition. The kit can also include a delivery device.

### VIII. Methods for Inhibiting MAPT Expression

[0707] The present disclosure also provides methods of inhibiting expression of a MAPT gene in a cell. The methods include contacting a cell with an RNAi agent, e.g., double stranded RNAi agent, in an amount effective to inhibit expression and/or activity of MAPT in the cell, thereby inhibiting expression and/or activity of MAPT in the cell. The present disclosure also provides methods of selective inhibition of exon 10-containing MAPT transcripts in a cell. The methods include contacting the cell with a dsRNA agent of the present disclosure, or a pharmaceutical composition of the present disclosure, thereby selectively degrading exon 10-containing MAPT transcripts in the cell. In certain embodiments, the cell is within a subject. In certain embodiments, the subject is a human. In certain embodiments, the subject has a MAPT-associated disorder. In certain embodiments, the MAPT-associated disorder is a neuro-degenerative disorder. In certain embodiments, the neurodegenerative disorder is associated with an abnormality of MAPT gene encoded protein Tau. In certain embodiments, the abnormality of MAPT gene encoded protein Tau results in aggregation of Tau in subject's brain.

[0708] In certain embodiments of the disclosure, MAPT expression and/or activity is inhibited by at leat 30% preferentially in CNS (e.g., brain) cells. In specific embodiments, MAPT expression and/or activity is inhibited by at least 30%. In certain embodiments, Tau protein level in serum of the subject is inhibited by at least 30%. In certain other embodiments of the disclosure, MAPT expression and/or activity is inhibited by at least 30% preferentially in hepatocytes.

[0709] Contacting of a cell with an RNAi agent, e.g., a double stranded RNAi agent, may be done in vitro or in vivo. Contacting a cell in vivo with the RNAi agent includes contacting a cell or group of cells within a subject, e.g., a human subject, with the RNAi agent. Combinations of in vitro and in vivo methods of contacting a cell are also possible. A108868_1030US_P2_Specification

[0710] Contacting a cell may be direct or indirect, as discussed above. Furthermore, contacting a cell may be accomplished via a targeting ligand, including any ligand described herein or known in the art. In some embodiments, the targeting ligand is a carbohydrate moiety, e.g., a GalNAc ligand, or any other ligand that directs the RNAi agent to a site of interest.

[0711] The term “inhibiting,” as used herein, is used interchangeably with “reducing,” “silencing,” “downregulating,” “suppressing” and other similar terms, and includes any level of inhibition. In certain embodiments, a level of inhibition, e.g., for an RNAi agent of the instant disclosure, can be assessed in cell culture conditions, e.g., wherein cells in cell culture are transfected via Lipofectamine™-mediated transfection at a concentration in the vicinity of a cell of 10 nM or less, 1 nM or less, etc. Knockdown of a given RNAi agent can be determined via comparison of pre-treated levels in cell culture versus post-treated levels in cell culture, optionally also comparing against cells treated in parallel with a scrambled or other form of control RNAi agent. Knockdown in cell culture of, e.g., at least about 30%, can thereby be identified as indicative of “inhibiting” or “reducing”, “downregulating” or “suppressing”, etc. having occurred. It is expressly contemplated that assessment of targeted mRNA or encoded protein levels (and therefore an extent of “inhibiting”, etc. caused by an RNAi agent of the disclosure) can also be assessed in in vivo systems for the RNAi agents of the instant disclosure, under properly controlled conditions as described in the art.

[0712] The phrase “inhibiting MAPT,” “inhibiting expression of a MAPT gene” or “inhibiting expression of MAPT,” as used herein, includes inhibition of expression of any MAPT gene (such as, e.g., a mouse MAPT gene, a rat MAPT gene, a monkey MAPT gene, or a human MAPT gene) as well as variants or mutants of a MAPT gene that encode a Tau. Thus, the MAPT gene may be a wild-type MAPT gene, a mutant MAPT gene, or a transgenic MAPT gene in the context of a genetically manipulated cell, group of cells, or organism.

[0713] “Inhibiting expression of a MAPT gene” includes any level of inhibition of a MAPT gene, e.g., at least partial suppression of the expression of a MAPT gene, such as an inhibition by at least about 25%. In certain embodiments, inhibition is at least about 25%, at least about 30%, at least about 40%, at least about 50%, at least about 60%, at least about 70%, at least about 80%, at least about 90%, or at least about 95%, or at least about 99%, relative to a control level. MAPT inhibition can be measured using the in vitro assay with, e.g., A549 cells and a 10 nM concentration of the RNA agent and the PCR assay as provided in the examples herein, are contemplated to be within the scope of the present disclosure. In some embodiments, MAPT inhibition can be measured using the in vitro assay with BE(2)-C cells. In some embodiments, MAPT inhibition can be measured using the in vitro assay with Neuro-2a cells. In another embodiment, MAPT inhibition can be measured using the in vitro assay with Cos-7 (Dual-Luciferase psiCHECK2 vector). In yet another embodiment, MAPT inhibition can be measured using the in vitro assay with primary mouse hepatocytes.

[0714] The expression of a MAPT gene may be assessed based on the level of any variable associated with MAPT gene expression, e.g., MAPT mRNA level (e.g., sense mRNA, antisense mRNA, total MAPT mRNA, sense MAPT repeat-containing mRNA, and/or antisense MAPT repeat-containing mRNA) or Tau level (e.g., total Tau, wild-type Tau, or expanded repeat-containing protein), or, for example, the level of sense- or antisense-containing foci and/or the level of aberrant dipeptide repeat protein.

[0715] Inhibition may be assessed by a decrease in an absolute or relative level of one or more of these variables compared with a control level. The control level may be any type of control level that is utilized in the art, e.g., a pre-dose baseline level, or a level determined from a similar subject, cell, or sample that is untreated or treated with a control (such as, e.g., buffer only control or inactive agent control).

[0716] For example, in some embodiments of the methods of the disclosure, expression of a MAPT gene (e.g., as assessed by sense- or antisense-containing foci and/or aberrant dipeptide repeat protein level) is inhibited by at least 20%, 30%, 40%, 50%, 60%, 70%, 80%, 85%, 90%, or 95%, relative to a control level, or to below the level of detection of the assay. In other embodiments of the methods of the disclosure, expression of a MAPT gene (e.g., as assessed by mRNA or protein expression level) is inhibited by at least about 25%, at least about 30%, at least about 40%, at least about 50%, at least about 60%, at least about 70%, at least about 80%, at least about 90%, or at least about 95% relative to a control level. In certain embodiments, the methods include a clinically relevant inhibition of expression of MAPT, e.g. as demonstrated by a clinically relevant outcome after treatment of a subject with an agent to reduce the expression of MAPT.

[0717] Inhibition of the expression of a MAPT gene may be manifested by a reduction of the amount of mRNA expressed by a first cell or group of cells (such cells may be present, for example, in a sample derived from a subject) in which a MAPT gene is transcribed and which has or have been treated (e.g., by contacting the cell or cells with an RNAi agent of the disclosure, or by administering an RNAi agent of the disclosure to a subject in which the cells are or were present) such that the expression of a MAPT gene is inhibited, as compared to a second cell or group of cells substantially identical to the first cell or group of cells but which has not or have not been so treated (control cell(s) not treated with an RNAi agent or not treated with an RNAi agent targeted to the gene of interest). The degree of inhibition may be expressed in terms of:

$$\frac{( mRNA in control cells ) - ( mRNA in treated cells )}{( mRNA in control cells )} \times 100 \%$$

[0718] In other embodiments, inhibition of the expression of a MAPT gene may be assessed in terms of a reduction of a parameter that is functionally linked to a MAPT gene expression, e.g., Tau expression, sense- or antisense-containing foci and/or the level of aberrant dipeptide repeat protein. MAPT gene silencing may be determined in any cell expressing MAPT, either endogenous or heterologous from an expression construct, and by any assay known in the art.

[0719] Inhibition of the expression of MAPT gene may be manifested by a reduction in the level of the Tau protein (or functional parameter, e.g., reduction in microtubule assembly) that is expressed by a cell or group of cells (e.g., the level of protein expressed in a sample derived from a subject). As explained above, for the assessment of mRNA suppression, the inhibiton of protein expression levels in a treated cell or group of cells may similarly be expressed as a percentage of the level of protein in a control cell or group of cells. In some embodiments, the phrase “inhibiting MAPT”, can also refer to the inhibition of Tau protein expression, e.g., at least partial suppression Tau expression, such as an inhibition by at least about 25%. In certain embodiments, inhibition of the MAPT activity is by at least about 25%, at least about 30%, at least about 40%, at least about 50%, at least about 60%, at least about 70%, at least about 80%, at least about 90%, or at least about 95%, or at least about 99%, relative to a control level. Tau protein levels can be measured using the in vitro assay with, e.g., the assay described in (Rubenstein et al. (2015) J. Neurotrauma 2015 Marl: 32 (5):342-352; Lim et al. (2014) Comput Struct Biotechnol J. 2014;12(20-21):7-13). MAPT expression can be measured using the in vitro assay with, e.g., the assay described in (Caillet-Boudin et al. (2015) Mol Neurodegener. 2015; 10:28; Hefti et al. (2018) PLoS ONE 13(4): e0195771).

[0720] A control cell or group of cells that may be used to assess the inhibition of the expression of a MAPT gene includes a cell or group of cells that has not yet been contacted with an RNAi agent of the disclosure. For example, the control cell or group of cells may be derived from an individual subject (e.g., a human or animal subject) prior to treatment of the subject with an RNAi agent.

[0721] The level of MAPT mRNA that is expressed by a cell or group of cells may be determined using any method known in the art for assessing mRNA expression. In one embodiment, the level of expression of MAPT in a sample is determined by detecting a transcribed polynucleotide, or portion thereof, e.g., mRNA of the MAPT gene. RNA may be extracted from cells using RNA extraction techniques including, for example, using acid phenol/guanidine isothiocyanate extraction (RNAzol B; Biogenesis), RNeasy™ RNA preparation kits (Qiagen®) or PAXgene (PreAnalytix, Switzerland). Typical assay formats utilizing ribonucleic acid hybridization include nuclear run-on assays, RT-PCR, RNase protection assays, northern blotting, in situ hybridization, and microarray analysis. Strand specific MAPT mRNAs may be detected using the quantitative RT-PCR and or droplet digital PCR methods described in, for example, Jiang, et al. supra, Lagier-Tourenne, et al., supra and Jiang, et al., supra. Circulating MAPT mRNA may be detected using methods the described in WO2012/177906, the entire contents of which are hereby incorporated herein by reference.

[0722] In some embodiments, the level of expression of MAPT is determined using a nucleic acid probe. The term “probe”, as used herein, refers to any molecule that is capable of selectively binding to a specific MAPT nucleic acid or protein, or fragment thereof. Probes can be synthesized by one of skill in the art, or derived from appropriate biological preparations. Probes may be specifically designed to be labeled. Examples of molecules that can be utilized as probes include, but are not limited to, RNA, DNA, proteins, antibodies, and organic molecules.

[0723] Isolated mRNA can be used in hybridization or amplification assays that include, but are not limited to, Southern or northern analyses, polymerase chain reaction (PCR) analyses and probe arrays. One method for the determination of mRNA levels involves contacting the isolated mRNA with a nucleic acid molecule (probe) that can hybridize to MAPT mRNA. In one embodiment, the mRNA is immobilized on a solid surface and contacted with a probe, for example by running the isolated mRNA on an agarose gel and transferring the mRNA from the gel to a membrane, such as nitrocellulose. In an alternative embodiment, the probe(s) are immobilized on a solid surface and the mRNA is contacted with the probe(s), for example, in an Affymetrix® gene chip array. A skilled artisan can readily adapt known mRNA detection methods for use in determining the level of MAPT mRNA.

[0724] An alternative method for determining the level of expression of MAPT in a sample involves the process of nucleic acid amplification or reverse transcriptase (to prepare cDNA) of for example mRNA in the sample, e.g., by RT-PCR (the experimental embodiment set forth in Mullis, 1987, U.S. Pat. No. 4,683,202), ligase chain reaction (Barany (1991) Proc. Natl. Acad. Sci. USA 88:189-193), self sustained sequence replication (Guatelli et al. (1990) Proc. Natl. Acad. Sci. USA 87:1874-1878), transcriptional amplification system (Kwoh et al. (1989) Proc. Natl. Acad. Sci. USA 86:1173-1177), Q-Beta Replicase (Lizardi et al. (1988) Bio/Technology 6:1197), rolling circle replication (Lizardi et al., U.S. Pat. No. 5,854,033) or any other nucleic acid amplification method, followed by the detection of the amplified molecules using techniques well known to those of skill in the art. These detection schemes are especially useful for the detection of nucleic acid molecules if such molecules are present in very low numbers. In particular aspects of the disclosure, the level of expression of MAPT is determined by quantitative fluorogenic RT-PCR (i.e., the TaqMan™ System), by a Dual-Glo® Luciferase assay, or by other art-recognized method for measurement of MAPT expression or mRNA level.

[0725] The expression level of MAPT mRNA may be monitored using a membrane blot (such as used in hybridization analysis such as northern, Southern, dot, and the like), or microwells, sample tubes, gels, beads or fibers (or any solid support comprising bound nucleic acids). See U.S. Pat. Nos. 5,770,722, 5,874,219, 5,744,305, 5,677,195 and 5,445,934, which are incorporated herein by reference. The determination of MAPT expression level may also comprise using nucleic acid probes in solution.

[0726] In some embodiments, the level of mRNA expression is assessed using branched DNA (bDNA) assays or real time PCR (qPCR). The use of this PCR method is described and exemplified in the Examples presented herein. Such methods can also be used for the detection of MAPT nucleic acids.

[0727] The level of Tau expression may be determined using any method known in the art for the measurement of protein levels. Such methods include, for example, electrophoresis, capillary electrophoresis, high performance liquid chromatography (HPLC), thin layer chromatography (TLC), hyperdiffusion chromatography, fluid or gel precipitin reactions, absorption spectroscopy, a colorimetric assays, spectrophotometric assays, flow cytometry, immunodiffusion (single or double), immunoelectrophoresis, western blotting, radioimmunoassay (RIA), enzyme-linked immunosorbent assays (ELISAs), immunofluorescent assays, electrochemiluminescence assays, and the like. Such assays can also be used for the detection of proteins indicative of the presence or replication of Tau. Tau protein levels can be measured using the in vitro assay with, e.g., the assay described in (Rubenstein et al. (2015) J. Neurotrauma 2015 Marl: 32 (5):342-352; Lim et al. (2014) Comput Struct Biotechnol J. 2014;12(20-21):7-13).

[0728] The level of sense- or antisense-containing foci and the level of aberrant dipeptide repeat protein may be assessed using methods well-known to one of ordinary skill in the art, including, for example, fluorescent in situ hybridization (FISH), immunohistochemistry and immunoassay (see, e.g., Jiang, et al. supra). In some embodiments, the efficacy of the methods of the disclosure in the treatment of a MAPT-associated disease is assessed by a decrease in MAPT mRNA level (e.g, by assessment of a CSF sample and/or plasma sample for MAPT level, by brain biopsy, or otherwise).

[0729] In some embodiments of the methods of the disclosure, the RNAi agent is administered to a subject such that the RNAi agent is delivered to a specific site within the subject. The inhibition of expression of MAPT may be assessed using measurements of the level or change in the level of MAPT mRNA (e.g., sense mRNA, antisense mRNA, total MAPT mRNA), Tau protein (e.g., total Tau protein, wild-type Tau protein), sense-containing foci, antisense-containing foci, aberrant dipeptide repeat protein in a sample derived from a specific site within the subject, e.g., CNS cells. In certain embodiments, the methods include a clinically relevant inhibition of expression of MAPT, e.g. as demonstrated by a clinically relevant outcome after treatment of a subject with an agent to reduce the expression of MAPT, such as, for example, stabilization or inhibition of caudate atrophy (e.g., as assessed by volumetric MRI (vMRI)), a stabilization or reduction in neurofilament light chain (NfL) levels in a CSF sample from a subject, a reduction in mutant MAPT mRNA or a cleaved mutant Tau, e.g., full-length mutant MAPT mRNA or protein and a cleaved mutant MAPT mRNA or protein.

[0730] As used herein, the terms detecting or determining a level of an analyte are understood to mean performing the steps to determine if a material, e.g., protein, RNA, is present. As used herein, methods of detecting or determining include detection or determination of an analyte level that is below the level of detection for the method used.

### IX. Methods of Treating or Preventing MAPT-Associated Diseases

[0731] The present disclosure also provides methods of using an RNAi agent of the disclosure or a composition containing an RNAi agent of the disclosure to reduce or inhibit MAPT expression in a cell. The methods include contacting the cell with a dsRNA of the disclosure and maintaining the cell for a time sufficient to obtain degradation of the mRNA transcript of a MAPT gene, thereby inhibiting expression of the MAPT gene in the cell.

[0732] In addition, the present disclosure also provides methods of using an RNAi agent of the disclosure or a composition containing an RNAi agent of the disclosure to reduce the level and/or inhibit formation of sense- and antisense-containing foci in a cell. The methods include contacting the cell with a dsRNA of the disclosure, thereby reducing the level of the MAPT sense- and antisense-containing foci in the cell.

[0733] The present disclosure also provides methods of using an RNAi agent of the disclosure or a composition containing an RNAi agent of the disclosure to reduce the level and/or inhibit formation of aberrant dipeptide repeat protein in a cell. The methods include contacting the cell with a dsRNA of the disclosure, thereby reducing the level of the aberrant dipeptide repeat protein in the cell.

[0734] Reduction in gene expression, the level of MAPT sense- and antisense-containing foci, and/or aberrant dipeptide repeat protein can be assessed by any methods known in the art. For example, a reduction in the expression of MAPT may be determined by determining the mRNA expression level of MAPT using methods routine to one of ordinary skill in the art, e.g., northern blotting, qRT-PCR; by determining the protein level of MAPT using methods routine to one of ordinary skill in the art, such as western blotting, immunological techniques.

[0735] In the methods of the disclosure the cell may be contacted in vitro or in vivo, i.e., the cell may be within a subject. The subject may be a human. The subject may have a MAPT-associated disorder. The MAPT-associated disorder may be a neurodegenerative disorder. The neurodegenerative disorder of the subject that can be associated with an abnormality of MAPT gene encoded protein Tau. The abnormality of MAPT gene encoded protein Tau may result in aggregation of Tau in subject's brain.

[0736] A cell suitable for treatment using the methods of the disclosure may be any cell that expresses a MAPT gene. A cell suitable for use in the methods of the disclosure may be a mammalian cell, e.g., a primate cell (such as a human cell or a non-human primate cell, e.g., a monkey cell or a chimpanzee cell), a non-primate cell (such as a rat cell, or a mouse cell). In one embodiment, the cell is a human cell, e.g., a human CNS cell.

[0737] MAPT expression (e.g., as assessed by sense mRNA, antisense mRNA, total MAPT mRNA, total Tau protein) is inhibited in the cell by about 20%, 25%, 30%, 35%, 40%, 45%, or 50% relative to the expression in a control cell. In certain embodiments, MAPT expression is inhibited by at least about 50%, at least about 60%, at least about 70%, at least about 80%, at least about 90%, or at least about 95% relative to a control level.

[0738] In preferred embodiments, MAPT expression is inhibited in the cell by at least 30%. In particular embodiments, inhibiting expression of MAPT may decrease Tau protein level in serum of the subject by at least 30%.

[0739] Inhibition, as assessed by sense- or antisense-containing foci and/or aberrant dipeptide repeat protein level) is inhibited in the cell by at least 20%, 30%, 40%, preferably at least 50%, 60%, 70%, 80%, 85%, 90%, or 95%, or to below the level of detection of the assay.

[0740] The in vivo methods of the disclosure may include administering to a subject a composition containing an RNAi agent, where the RNAi agent includes a nucleotide sequence that is complementary to at least a part of an RNA transcript of the MAPT gene of the mammal to be treated. When the organism to be treated is a mammal such as a human, the composition can be administered by any means known in the art including, but not limited to oral, intraperitoneal, or parenteral routes, including intracranial (e.g., intraventricular, intraparenchymal, and intrathecal), intravenous, intramuscular, intravitreal, subcutaneous, transdermal, airway (aerosol), nasal, rectal, and topical (including buccal and sublingual) administration. In certain embodiments, the compositions are administered by intravenous infusion or injection. In certain embodiments, the compositions are administered by subcutaneous injection. In certain embodiments, the compositions are administered by intrathecal injection.

[0741] In some embodiments, the administration is via a depot injection. A depot injection may release the RNAi agent in a consistent way over a prolonged time period. Thus, a depot injection may reduce the frequency of dosing needed to obtain a desired effect, e.g., a desired inhibition of MAPT, or a therapeutic or prophylactic effect. A depot injection may also provide more consistent serum concentrations. Depot injections may include subcutaneous injections or intramuscular injections. In preferred embodiments, the depot injection is a subcutaneous injection.

[0742] In some embodiments, the administration is via a pump. The pump may be an external pump or a surgically implanted pump. In certain embodiments, the pump is a subcutaneously implanted osmotic pump. In other embodiments, the pump is an infusion pump. An infusion pump may be used for intracranial, intravenous, subcutaneous, arterial, or epidural infusions. In preferred embodiments, the infusion pump is a subcutaneous infusion pump. In other embodiments, the pump is a surgically implanted pump that delivers the RNAi agent to the CNS.

[0743] The mode of administration may be chosen based upon whether local or systemic treatment is desired and based upon the area to be treated. The route and site of administration may be chosen to enhance targeting.

[0744] In one aspect, the present disclosure also provides methods for inhibiting the expression of a MAPT gene in a mammal. The methods include administering to the mammal a composition comprising a dsRNA that targets a MAPT gene in a cell of the mammal, thereby inhibiting expression of the MAPT gene in the cell. Reduction in gene expression can be assessed by any methods known it the art and by methods, e.g. qRT-PCR, described herein. Reduction in protein production can be assessed by any methods known it the art and by methods, e.g. ELISA, described herein. In one embodiment, a CNS biopsy sample or a cerebrospinal fluid (CSF) sample serves as the tissue material for monitoring the reduction in MAPT gene or protein expression (or of a proxy therefore).

[0745] The present disclosure further provides methods of treatment of a subject in need thereof. The treatment methods of the disclosure include administering an RNAi agent of the disclosure to a subject, e.g., a subject that would benefit from inhibition of MAPT expression, such as a subject having a missense and/or deleteion mutations in the MAPT gene, in a therapeutically effective amount of an RNAi agent targeting a MAPT gene or a pharmaceutical composition comprising an RNAi agent targeting a MAPT gene.

[0746] In addition, the present disclosure provides methods of preventing, treating or inhibiting the progression of a MAPT-associated disease or disorder (e.g., Alzheimer's disease, FTD, PSP, or another tauopathy), in a subject. The methods include administering to the subject a therapeutically effective amount of any of the RNAi agent, e.g., dsRNA agents, or the pharmaceutical composition provided herein, thereby preventing, treating or inhibiting the progression of a MAPT-associated disease or disorder in the subject. A MAPT-associated disease or disorder that can be prevented by the method of the disclosure can be associated with an abnormality of MAPT gene encoded protein Tau. The abnormality of MAPT gene encoded protein Tau results in aggregation of Tau in subject's brain. The subject may be human. Administration of a dsRNA agent of the disclosure, or a pharmaceutical composition of the disclosure, may cause a decrease in Tau aggregation in the subject's brain.

[0747] An RNAi agent of the disclosure may be administered as a “free RNAi agent.” A free RNAi agent is administered in the absence of a pharmaceutical composition. The naked RNAi agent may be in a suitable buffer solution. The buffer solution may comprise acetate, citrate, prolamine, carbonate, or phosphate, or any combination thereof. In one embodiment, the buffer solution is phosphate buffered saline (PBS). The pH and osmolarity of the buffer solution containing the RNAi agent can be adjusted such that it is suitable for administering to a subject.

[0748] Alternatively, an RNAi agent of the disclosure may be administered as a pharmaceutical composition, such as a dsRNA liposomal formulation.

[0749] Subjects that would benefit from a reduction or inhibition of MAPT gene expression are those having a MAPT-associated disease. Exemplary MAPT-associated diseases include, but are not limited to, tauopathy, Alzheimer disease, frontotemporal dementia (FTD), behavioral variant frontotemporal dementia (bvFTD), nonfluent variant primary progressive aphasia (nfvPPA), primary progressive aphasia-semantic (PPA-S), primary progressive aphasia-logopenic (PPA-L), frontotemporal dementia with parkinsonism linked to chromosome 17 (FTDP-17), Pick's disease (PiD), argyrophilic grain disease (AGD), multiple system tauopathy with presenile dementia (MSTD), white matter tauopathy with globular glial inclusions (FTLD with GGIs), FTLD with MAPT mutations, neurofibrillary tangle (NFT) dementia, FTD with motor neuron disease, amyotrophic lateral sclerosis (ALS), corticobasal syndrome (CBS), corticobasal degeneration (CBD), progressive supranuclear palsy (PSP), Parkinson's disease, postencephalitic Parkinsonism, Niemann-Pick disease, Huntington disease, type 1 myotonic dystrophy, and Down syndrome (DS).

[0750] The disclosure further provides methods for the use of an RNAi agent or a pharmaceutical composition thereof, e.g., for treating a subject that would benefit from reduction or inhibition of MAPT expression, e.g., a subject having a MAPT-associated disorder, in combination with other pharmaceuticals or other therapeutic methods, e.g., with known pharmaceuticals or known therapeutic methods, such as, for example, those which are currently employed for treating these disorders. For example, in certain embodiments, an RNAi agent targeting MAPT is administered in combination with, e.g., an agent useful in treating a MAPT-associated disorder as described elsewhere herein or as otherwise known in the art. For example, additional agents suitable for treating a subject that would benefit from reduction in MAPT expression, e.g., a subject having a MAPT-associated disorder, may include agents currently used to treat symptoms of MAPT-associated diseases. The RNAi agent and additional therapeutic agents may be administered at the same time or in the same combination, e.g., intrathecally, or the additional therapeutic agent can be administered as part of a separate composition or at separate times or by another method known in the art or described herein.

[0751] Exemplary additional therapeutics include, for example, a monoamine inhibitor, e.g., tetrabenazine (Xenazine), deutetrabenazine (Austedo), and reserpine, an anticonvulsant, e.g., valproic acid (Depakote, Depakene, Depacon), and clonazepam (Klonopin), an antipsychotic agent, e.g., risperidone (Risperdal), and haloperidol (Haldol), and an antidepressant, e.g., paroxetine (Paxil).

[0752] In one embodiment, the method includes administering a composition featured herein such that expression of the target MAPT gene is decreased, for at least one month. In preferred embodiments, expression is decreased for at least 2 months, 3 months, or 6 months.

[0753] Preferably, the RNAi agents useful for the methods and compositions featured herein specifically target RNAs (primary or processed) of the target MAPT gene. Compositions and methods for inhibiting the expression of these genes using RNAi agents can be prepared and performed as described herein.

[0754] Administration of the dsRNA according to the methods of the disclosure may result in a reduction of the severity, signs, symptoms, or markers of such diseases or disorders in a patient with a MAPT-associated disorder. By “reduction” in this context is meant a statistically significant or clinically significant decrease in such level. The reduction can be, for example, at least about 5%, at least about 10%, at least about 15%, at least about 20%, at least about 25%, at least about 30%, at least about 35%, at least about 40%, at least about 45%, at least about 50%, at least about 55%, at least about 60%, at least about 65%, at least about 70%, at least about 75%, at least about 80%, at least about 85%, at least about 90%, at least about 95%, or about 100% relative to a control level. Efficacy of treatment or prevention of disease can be assessed, for example by measuring disease progression, disease remission, symptom severity, reduction in pain, quality of life, dose of a medication required to sustain a treatment effect, level of a disease marker or any other measurable parameter appropriate for a given disease being treated or targeted for prevention. It is well within the ability of one skilled in the art to monitor efficacy of treatment or prevention by measuring any one of such parameters, or any combination of parameters. For example, efficacy of treatment of a MAPT-associated disorder may be assessed, for example, by periodic monitoring of a subject's. Comparisons of the later readings with the initial readings provide a physician an indication of whether the treatment is effective. It is well within the ability of one skilled in the art to monitor efficacy of treatment or prevention by measuring any one of such parameters, or any combination of parameters. In connection with the administration of an RNAi agent targeting MAPT or pharmaceutical composition thereof, “effective against” a MAPT-associated disorder indicates that administration in a clinically appropriate manner results in a beneficial effect for at least a statistically significant fraction of patients, such as an improvement of symptoms, a cure, a reduction in disease, extension of life, improvement in quality of life, or other effect generally recognized as positive by medical doctors familiar with treating MAPT-associated disorders and the related causes.

[0755] A treatment or preventive effect is evident when there is a statistically significant improvement in one or more parameters of disease status, or by a failure to worsen or to develop symptoms where they would otherwise be anticipated. As an example, a favorable change of at least 10% in a measurable parameter of disease, and preferably at least 20%, 30%, 40%, 50% or more can be indicative of effective treatment. Efficacy for a given RNAi agent drug or formulation of that drug can also be judged using an experimental animal model for the given disease as known in the art. When using an experimental animal model, efficacy of treatment is evidenced when a statistically significant reduction in a marker or symptom is observed.

[0756] Alternatively, the efficacy can be measured by a reduction in the severity of disease as determined by one skilled in the art of diagnosis based on a clinically accepted disease severity grading scale. Any positive change resulting in e.g., lessening of severity of disease measured using the appropriate scale, represents adequate treatment using an RNAi agent or RNAi agent formulation as described herein.

[0757] In certain embodiments, subjects can be administered a therapeutic amount of dsRNA, such as about 0.01 mg/kg to about 200 mg/kg. In other embodiments, subjects can be administered a therapeutic amount of dsRNA, such as about 0.01 mg/kg to about 500 mg/kg. In yet other embodiments, subjects can be administered a therapeutic amount of dsRNA of about 500 mg/kg or more.

[0758] The RNAi agent can be administered intrathecally, via intravitreal injection, or by intravenous infusion over a period of time, on a regular basis. In certain embodiments, after an initial treatment regimen, the treatments can be administered on a less frequent basis. Administration of the RNAi agent can reduce MAPT levels, e.g., in a cell, tissue, blood, CSF sample or other compartment of the patient. In one embodiment, administration of the RNAi agent can reduce MAPT levels, e.g., in a cell, tissue, blood, CSF sample or other compartment of the patient by at least about 25%, such as about 25%, about 30%, about 40%, about 50%, about 60%, about 70%, about 80%, about 90%, or about 95% relative to a control level.

[0759] Before administration of a full dose of the RNAi agent, patients can be administered a smaller dose, such as a 5% infusion reaction, and monitored for adverse effects, such as an allergic reaction. In another example, the patient can be monitored for unwanted immunostimulatory effects, such as increased cytokine (e.g., TNF-alpha or INF-alpha) levels.

[0760] Alternatively, the RNAi agent can be administered subcutaneously, i.e., by subcutaneous injection. One or more injections may be used to deliver the desired, e.g., monthly dose of RNAi agent to a subject. The injections may be repeated over a period of time. The administration may be repeated on a regular basis. In certain embodiments, after an initial treatment regimen, the treatments can be administered on a less frequent basis. A repeat-dose regimen may include administration of a therapeutic amount of RNAi agent on a regular basis, such as monthly or extending to once a quarter, twice per year, once per year. In certain embodiments, the RNAi agent is administered about once per month to about once per quarter (i.e., about once every three months).

[0761] Unless otherwise defined, all technical and scientific terms used herein have the same meaning as commonly understood by one of ordinary skill in the art to which this invention belongs. Although methods and materials similar or equivalent to those described herein can be used in the practice or testing of the RNAi agents and methods featured in the invention, suitable methods and materials are described below. All publications, patent applications, patents, and other references mentioned herein are incorporated by reference in their entirety. In case of conflict, the present specification, including definitions, will control. In addition, the materials, methods, and examples are illustrative only and not intended to be limiting.

[0762] An informal Sequence Listing is filed herewith and forms part of the specification as filed.

### EXAMPLES

### Example 1. RNAi Agent Design, Synthesis, Selection, and In Vitro Evaluation

[0763] This Example describes methods for the design, synthesis, selection, and in vitro evaluation of MAPT RNAi agents.

### Source of Reagents

[0764] Where the source of a reagent is not specifically given herein, such reagent can be obtained from any supplier of reagents for molecular biology at a quality/purity standard for application in molecular biology.

### Bioinformatics

[0765] siRNAs targeting the human MAPT transcripts (Homo sapiens microtubule associated protein tau (MAPT), transcript variant 4, mRNA, NCBI refseqID NM_016841.4; NCBI GeneID: 4137 and Homo sapiens microtubule associated protein tau (MAPT), transcript variant 2, mRNA, NCBI refseqID NM_005910.6; NCBI GeneID: 4137) were designed using custom R and Python scripts. The human NM_016841.4mRNA has a length of 5544 bases. The human NM_005910.6 mRNA has a length of 5639 bases.

[0766] Detailed lists of the unmodified MAPT sense and antisense strand nucleotide sequences targeting human MAPT transcript are shown in Tables 3-5, 16, 18, 20, 22, 25 and 27. Detailed lists of the modified MAPT sense and antisense strand nucleotide sequences targeting human MAPT transcript are shown in Table 6-8, 17, 19, 21, 23, 26 and 28.

[0767] siRNAs targeting the mouse MAPT transcript (Mus musculus microtubule-associated protein tau (Mapt), mRNA, NCBI refseqID NM_001038609; NCBI GeneID: 17762) were designed using custom R and Python scripts. The mouse NM_001038609.2 mRNA has a length of 5396 bases.

[0768] siRNAs targeting the macaque MAPT transcript (Macaca fascicularis microtubule associated protein tau (MAPT), transcript variant X13, NCBI refseqID XM_005584540.1; NCBI GeneID: 102119414) were designed using custom R and Python scripts. The mouse XM_005584540.1 mRNA has a length of 5790 bases.

[0769] Detailed lists of the unmodified MAPT sense and antisense strand nucleotide sequences targeting mouse MAPT transcript are shown in Table 12. Detailed lists of the modified MAPT sense and antisense strand nucleotide sequences targeting mouse MAPT transcript are shown in Table 13.

[0770] It is to be understood that, throughout the application, a duplex name without a decimal is equivalent to a duplex name with a decimal which merely references the batch number of the duplex. For example, AD-523561 is equivalent to AD-523561.1.

### In Vitro Screening in BE(2)-C and Neuro-2a Cells

[0771] i. Cell Culture and Transfections:

[0772] BE(2)-C(ATCC) were transfected by adding 5 μl of Opti-MEM plus 0.1 μl of Lipofectamine RNAimax per well (Invitrogen, Carlsbad Calif. cat #13778-150) to 5 μl of siRNA duplexes per well, with 4 replicates of each siRNA duplex, into a 384-well plate, and incubated at room temperature for 15 minutes. Forty μl of 1:1 mixture of Minimum Essential Medium and F12 Medium (ThermoFisher) containing ˜5×10³ cells were then added to the siRNA mixture. Cells were incubated for 24 hours prior to RNA purification. The results of the screening of the dsRNA agents listed in Tables 3-8 and 12-13 in BE(2)-C cells are shown in Tables 9-11 and table 14, respectively. For screen 1 shown in Table 9, four dose experiments were performed at 50 nM, 10 nM 1 nM and 0.1 nM. For screens 2-3 shown in Tables 10-11, three dose experiments were performed at 10 nM, 1 nM and 0.1 nM. For screen 4 shown in Table 14, two dose experiments were performed at 10 nM and 0.1 nM. The results of the screening of the dsRNA agents for screens 5-8 listed in Tables 16-23 in BE(2)-C cells are shown in Table 24. For screens 5-8, three dose experiments were performed at 10 nM, 1 nM and 0.1 nM.

[0773] Neuro-2a (ATCC) were transfected by adding 5 μl of Opti-MEM plus 0.1 μl of Lipofectamine RNAimax per well (Invitrogen, Carlsbad Calif. cat #13778-150) to 5 μl of siRNA duplexes per well, with 4 replicates of each siRNA duplex, into a 384-well plate, and incubated at room temperature for 15 minutes. Forty 1 of Minimum Essential Medium (ThermoFisher) containing ˜5×10³ cells were then added to the siRNA mixture. Cells were incubated for 24 hours prior to RNA purification. The results of the screening of the dsRNA agents listed in Tables 12-13 in Neuro-2a (mouse) cells are shown in Table 15. For screen 4 shown in Table 15, two dose experiments were performed at 10 nM and 0.1 nM.

[0774] ii. Total RNA Isolation Using DYNABEADS mRNA Isolation Kit:

[0775] RNA was isolated using an automated protocol on a BioTek-EL406 platform using DYNABEADs (Invitrogen, cat #61012). Briefly, 70 ul of Lysis/Binding Buffer and 10 ul of lysis buffer containing 3 ul of magnetic beads were added to the plate with cells. Plates were incubated on an electromagnetic shaker for 10 minutes at room temperature and then magnetic beads were captured and the supernatant was removed. Bead-bound RNA was then washed 2 times with 150 ul Wash Buffer A and once with Wash Buffer B. Beads were then washed with 150 ul Elution Buffer, re-captured and supernatant removed.

[0776] iii. cDNA Synthesis Using ABI High Capacity cDNA Reverse Transcription Kit (Applied Biosystems, Foster City, Calif., Cat #4368813):

[0777] Ten μl of a master mix containing 1 μl 10× Buffer, 0.4 ul 25× dNTPs, 1 μl 10× Random primers, 0.5 μl Reverse Transcriptase, 0.5 μl RNase inhibitor and 6.6 μl of H₂O per reaction was added to RNA isolated above. Plates were sealed, mixed, and incubated on an electromagnetic shaker for 10 minutes at room temperature, followed by 2 h 37° C.

[0778] iv. Real Time PCR:

[0779] Two μl of cDNA and 5 μl Lightcycler 480 probe master mix (Roche Cat #04887301001) were added to either 0.5 μl of Human GAPDH TaqMan Probe (4326317E) and 0.5 μl human MAPT probe (hs00902194_m1, Thermo) or 0.5 μl Mouse GAPDH TaqMan Probe (4352339E) and 0.5 μl mouse MAPT probe (Mm00521988_m1, Thermo) per well in a 384 well plates (Roche cat #04887301001). Real time PCR was done in a LightCycler480 Real Time PCR system (Roche). Each duplex was tested at least two times and data were normalized to cells transfected with a non-targeting control siRNA. To calculate relative fold change, real time data were analyzed using the ΔΔCt method and normalized to assays performed with cells transfected with a non-targeting control siRNA.

TABLE 2
Abbreviations of nucleotide monomers used in nucleic acid sequence representation. It will be understood
that these monomers, when present in an oligonucleotide, are mutually linked by 5′-3′-phosphodiester bonds, and it is
understood that when the nucleotide contains a 2′-fluoro modification, then the fluoro replaces the hydroxy at that
position in the parent nucleotide (i.e., it is a 2′-deoxy-2′-fluoronucleotide).

| Abbrevi- | |
|---|---|
| ation | Nucleotide(s) |
| A | Adenosine-3′-phosphate |
| Ab | beta-L-adenosine-3′-phosphate |
| Abs | beta-L-adenosine-3′-phosphorothioate |
| Af | 2′-fluoroadenosine-3′-phosphate |
| Afs | 2′-fluoroadenosine-3′-phosphorothioate |
| As | adenosine-3′-phosphorothioate |
| C | cytidine-3′-phosphate |
| Cb | beta-L-cytidine-3′-phosphate |
| Cbs | beta-L-cytidine-3′-phosphorothioate |
| Cf | 2′-fluorocytidine-3′-phosphate |
| Cfs | 2′-fluorocytidine-3′-phosphorothioate |
| Cs | cytidine-3′-phosphorothioate |
| G | guanosine-3′-phosphate |
| Gb | beta-L-guanosine-3′-phosphate |
| Gbs | beta-L-guanosine-3′-phosphorothioate |
| Gf | 2′-fluoroguanosine-3′-phosphate |
| Gfs | 2′-fluoroguanosine-3′-phosphorothioate |
| Gs | guanosine-3′-phosphorothioate |
| T | 5′-methyluridine-3′-phosphate |
| Tf | 2′-fluoro-5-methyluridine-3′-phosphate |
| Tfs | 2′-fluoro-5-methyluridine-3′-phosphorothioate |
| Ts | 5-methyluridine-3′-phosphorothioate |
| U | Uridine-3′-phosphate |
| Uf | 2′-fluorouridine-3′-phosphate |
| Ufs | 2′-fluorouridine-3′-phosphorothioate |
| Us | uridine-3′-phosphorothioate |
| N | any nucleotide, modified or unmodified |
| a | 2′-O-methyladenosine-3′-phosphate |
| as | 2′-O-methyladenosine-3′-phosphorothioate |
| c | 2′-O-methylcytidine-3′-phosphate |
| cs | 2′-O-methylcytidine-3′-phosphorothioate |
| g | 2′-O-methylguanosine-3′-phosphate |
| gs | 2′-O-methylguanosine-3′-phosphorothioate |
| t | 2′-O-methyl-5-methyluridine-3′-phosphate |
| ts | 2′-O-methyl-5-methyluridine-3’-phosphorothioate |
| u | 2′-O-methyluridine-3′-phosphate |
| us | 2′-O-methyluridine-3′-phosphorothioate |
| s | phosphorothioate linkage |
| L96 | N-[tris(GalNAc-alkyl)-amidodecanoyl)]-4-hydroxyprolinol |
| | Hyp-(GalNAc-alkyl)3 |
| | [chemical structure] |
| Y34 | 2-hydroxymethyl-tetrahydrofurane-4-methoxy-3-phosphate (abasic 2′-OMe |
| | furanose) |
| Y44 | inverted abasic DNA (2-hydroxymethyl-tetrahydrofurane-5-phosphate) |
| (Agn) | Adenosine-glycol nucleic acid (GNA) |
| (Cgn) | Cytidine-glycol nucleic acid (GNA) |
| (Ggn) | Guanosine-glycol nucleic acid (GNA) |
| (Tgn) | Thymidine-glycol nucleic acid (GNA) S-Isomer |
| P | Phosphate |
| VP | Vinyl-phosphonate |
| dA | 2′-deoxyadenosine-3′-phosphate |
| dAs | 2′-deoxyadenosine-3′-phosphorothioate |
| dC | 2′-deoxycytidine-3′-phosphate |
| dCs | 2′-deoxycytidine-3′-phosphorothioate |
| dG | 2′-deoxyguanosine-3′-phosphate |
| dGs | 2′-deoxyguanosine-3′-phosphorothioate |
| dT | 2′-deoxythymidine-3′-phosphate |
| dTs | 2′-deoxythymidine-3′-phosphorothioate |
| dU | 2′-deoxyuridine |
| dUs | 2′-deoxyuridine-3-phosphorothioate |
| (Ahd) | 2′-O-hexadecyl-adenosine-3′-phosphate |
| (Ahds) | 2′-O-hexadecyl-adenosine-3′-phosphorothioate |
| (Chd) | 2′-O-hexadecyl-cytidine-3′-phosphate |
| (Chds) | 2′-O-hexadecyl-cytidine-3′-phosphorothioate |
| (Ghd) | 2′-O-hexadecyl-guanosine-3′-phosphate |
| (Ghds) | 2′-O-hexadecyl-guanosine-3′-phosphorothioate |
| (Uhd) | 2′-O-hexadecyl-uridine-3′-phosphate |
| (Uhds) | 2′-O-hexadecyl-uridine-3′-phosphorothioate |

TABLE 3
Unmodified Sense and Antisense Strand Sequences of MAPT dsRNA Agents- Screen 1

| | Sense | SEQ | | Range in | Antisense | SEQ | | Range |
|---|---|---|---|---|---|---|---|---|
| Duplex | Sequence | ID | Source and | NM_ | Sequence | ID | Source and | in NM_ |
| Name | 5′ to 3′ | NO: | Range | 016841.4 | 5′ to 3′ | NO: | Range | 016841.4 |
| AD- | AUAGUCUACAA | 13 | NM_016841.4_ | 977-997 | UUCAACUGGUUUG | 88 | NM_016841.4_ | 975-997 |
| 523799.1 | ACCAGUUGAA | | 977- | | UAGACUAUUU | | 975- | |
| | | | 997_C21U_s | | | | 997_G1A_as | |
| AD- | GUCUACAAACC | 14 | NM_016841.4_ | 980-1000 | UAGGUCAACUGGU | 89 | NM_016841.4_ | 978-1000 |
| 523802.1 | AGUUGACCUA | | 980- | | UUGUAGACUA | | 978- | |
| | | | 1000_G21U_s | | | | 1000_C1A_as | |
| AD- | GCAAAUAGUCU | 15 | NM_016841.4_ | 973-993 | UCUGGUUUGUAGA | 90 | NM_016841.4_ | 971-993 |
| 523795.1 | ACAAACCAGA | | 973-993_s | | CUAUUUGCAC | | 971-993_as | |
| AD- | ACCAGUUGACC | 16 | NM_016841.4_ | 988-1008 | UCCUUGCUCAGGU | 91 | NM_016841.4_ | 986-1008 |
| 523810.1 | UGAGCAAGGA | | 988-1008_s | | CAACUGGUUU | | 986-1008_as | |
| AD- | AACCAGUUGAC | 17 | NM_016841.4_ | 987-1007 | UCUUGCUCAGGUC | 92 | NM_016841.4_ | 985-1007 |
| 523809.1 | CUGAGCAAGA | | 987- | | AACUGGUUUG | | 985- | |
| | | | 1007_G21U_s | | | | 1007_C1A_as | |
| AD- | UGCAAAUAGUC | 18 | NM_016841.4_ | 972-992 | UUGGUUUGUAGAC | 93 | NM_005910.5_ | 970-992 |
| 1019331.1 | UACAAACCAA | | 972- | | UAUUUGCACA | | 1237- | |
| | | | 992_G21U_s | | | | 1259_C1U_as | |
| AD- | AGUCUACAAAC | 19 | NM_016841.4_ | 979-999 | UGGUCAACUGGUU | 94 | NM_016841.4_ | 977-999 |
| 523801.1 | CAGUUGACCA | | 979-999_s | | UGUAGACUAU | | 977-999_as | |
| AD- | AGCAAGGUGAC | 20 | NM_016841.4_ | 1001-1021 | UCACUUGGAGGUC | 95 | NM_016841.4_ | 999-1021 |
| 523823.1 | CUCCAAGUGA | | 1001-1021_s | | ACCUUGCUCA | | 999-1021_as | |
| AD- | AAUAGUCUACA | 21 | NM_016841.4_ | 976-996 | UCAACUGGUUUGU | 96 | NM_016841.4_ | 974-996 |
| 523798.1 | AACCAGUUGA | | 976- | | AGACUAUUUG | | 974- | |
| | | | 996_A21U_s | | | | 996_U1A_as | |
| AD- | UGACCUGAGCA | 22 | NM_016841.4_ | 994-1014 | UAGGUCACCUUGC | 97 | NM_016841.4_ | 992-1014 |
| 523816.1 | AGGUGACCUA | | 994- | | UCAGGUCAAC | | 992- | |
| | | | 1014_C21U_s | | | | 1014_G1A_as | |
| AD- | GCAAGGUGACC | 23 | NM_016841.4_ | 1002-1022 | UACACUUGGAGGU | 98 | NM_016841.4_ | 1000-1022 |
| 523824.1 | UCCAAGUGUA | | 1002- | | CACCUUGCUC | | 1000- | |
| | | | 1022_G21U_s | | | | 1022_C1A_as | |
| AD- | UAGUCUACAAA | 24 | NM_016841.4_ | 978-998 | UGUCAACUGGUUU | 99 | NM_016841.4_ | 976-998 |
| 523800.1 | CCAGUUGACA | | 978- | | GUAGACUAUU | | 976- | |
| | | | 998_C21U_s | | | | 998_G1A_as | |
| AD- | CAAAUAGUCUA | 25 | NM_016841.4_ | 974-994 | UACUGGUUUGUAG | 100 | NM_016841.4_ | 972-994 |
| 523796.1 | CAAACCAGUA | | 974-994_s | | ACUAUUUGCA | | 972-994_as | |
| AD- | UCUACAAACCA | 26 | NM_016841.4_ | 981-1001 | UCAGGUCAACUGG | 101 | NM_016841.4_ | 979-1001 |
| 523803.1 | GUUGACCUGA | | 981- | | UUUGUAGACU | | 979- | |
| | | | 1001_A21U_s | | | | 1001_U1A_as | |
| AD- | GACCUGAGCAA | 27 | NM_016841.4_ | 995-1015 | UGAGGUCACCUUG | 102 | NM_016841.4_ | 993-1015 |
| 523817.1 | GGUGACCUCA | | 995- | | CUCAGGUCAA | | 993- | |
| | | | 1015_C21U_s | | | | 1015_G1A_as | |
| AD- | CAAGGUGACCU | 28 | NM_016841.4_ | 1003-1023 | UCACACUUGGAGG | 103 | NM_016841.4_ | 1001-1023 |
| 523825.1 | CCAAGUGUGA | | 1003- | | UCACCUUGCU | | 1001- | |
| | | | 1023_G21U_s | | | | 1023_C1A_as | |
| AD- | CCAGUUGACCU | 29 | NM_016841.4_ | 989-1009 | UACCUUGCUCAGG | 104 | NM_016841.4_ | 987-1009 |
| 523811.1 | GAGCAAGGUA | | 989- | | UCAACUGGUU | | 987- | |
| | | | 1009_G21U_s | | | | 1009_C1A_as | |
| AD- | GGCAACAUCCA | 30 | NM_016841.4_ | 1031-1051 | UGGUUUAUGAUGG | 105 | NM_016841.4_ | 1029-1051 |
| 523854.1 | UCAUAAACCA | | 1031- | | AUGUUGCCUA | | 1029- | |
| | | | 1051_A21U_s | | | | 1051_U1A_as | |
| AD- | AAAUAGUCUAC | 31 | NM_016841.4_ | 975-995 | UAACUGGUUUGUA | 106 | NM_016841.4_ | 973-995 |
| 523797.1 | AAACCAGUUA | | 975- | | GACUAUUUGC | | 973- | |
| | | | 995_G21U_s | | | | 995_C1A_as | |
| AD- | UACAAACCAGU | 32 | NM_016841.4_ | 983-1003 | UCUCAGGUCAACU | 107 | NM_016841.4_ | 981-1003 |
| 523805.1 | UGACCUGAGA | | 983- | | GGUUUGUAGA | | 981- | |
| | | | 1003_C21U_s | | | | 1003_G1A_as | |
| AD- | GUUGACCUGAG | 33 | NM_016841.4_ | 992-1012 | UGUCACCUUGCUC | 108 | NM_016841.4_ | 990-1012 |
| 523814.1 | CAAGGUGACA | | 992- | | AGGUCAACUG | | 990- | |
| | | | 1012_C21U_s | | | | 1012_G1A_as | |
| AD- | CUACAAACCAG | 34 | NM_016841.4_ | 982-1002 | UUCAGGUCAACUG | 109 | NM_016841.4_ | 980-1002 |
| 523804.1 | UUGACCUGAA | | 982- | | GUUUGUAGAC | | 980- | |
| | | | 1002_G21U_s | | | | 1002_C1A_as | |
| AD- | GUGUGCAAAUA | 35 | NM_005910.5_ | 1236-1256 | UUUUGUAGACUAU | 110 | NM_005910.5_ | 1234-1256 |
| 1019356.1 | GUCUACAAAA | | 1236- | | UUGCACACUG | | 1234- | |
| | | | 1256_C21A_s | | | | 1256_G1U_as | |
| AD- | GCUCAUUAGGC | 36 | NM_016841.4_ | 1023-1043 | UAUGGAUGUUGCC | 111 | NM_016841.4_ | 1021-1043 |
| 523846.1 | AACAUCCAUA | | 1023- | | UAAUGAGCCA | | 1021- | |
| | | | 1043_C21U_s | | | | 1043_G1A_as | |
| AD- | AAACCAGUUGA | 37 | NM_016841.4_ | 986-1006 | UUUGCUCAGGUCA | 112 | NM_016841.4_ | 984-1006 |
| 523808.1 | CCUGAGCAAA | | 986- | | ACUGGUUUGU | | 984- | |
| | | | 1006_G21U_s | | | | 1006_C1A_as | |
| AD- | CCAAGUGUGGC | 38 | NM_016841.4_ | 1014-1034 | UGCCUAAUGAGCC | 113 | NM_016841.4_ | 1012-1034 |
| 523835.1 | UCAUUAGGCA | | 1014- | | ACACUUGGAG | | 1012- | |
| | | | 1034_A21U_s | | | | 1034_U1A_as | |
| AD- | UGUGCAAAUAG | 39 | NM_005910.5_ | 1237-1257 | UGUUUGUAGACUA | 114 | NM_005910.5_ | 1235-1257 |
| 1019357.1 | UCUACAAACA | | 1237- | | UUUGCACACU | | 1235- | |
| | | | 1257_C21A_s | | | | 1257_G1U_as | |
| AD- | AGGCAACAUCC | 40 | NM_016841.4_ | 1030-1050 | UGUUUAUGAUGGA | 115 | NM_016841.4_ | 1028-1050 |
| 523853.1 | AUCAUAAACA | | 1030- | | UGUUGCCUAA | | 1028- | |
| | | | 1050_C21U_s | | | | 1050_G1A_as | |
| AD- | CCUGAGCAAGG | 41 | NM_016841.4_ | 997-1017 | UUGGAGGUCACCU | 116 | NM_016841.4_ | 995-1017 |
| 523819.1 | UGACCUCCAA | | 997- | | UGCUCAGGUC | | 995- | |
| | | | 1017_A21U_s | | | | 1017_U1A_as | |
| AD- | GACCUCCAAGU | 42 | NM_016841.4_ | 1009-1029 | UAUGAGCCACACU | 117 | NM_016841.4_ | 1007-1029 |
| 523830.1 | GUGGCUCAUA | | 1009-1029_s | | UGGAGGUCAC | | 1007-1029_as | |
| AD- | UCCAAGUGUGG | 43 | NM_016841.4_ | 1013-1033 | UCCUAAUGAGCCA | 118 | NM_016841.4_ | 1011-1033 |
| 523834.1 | CUCAUUAGGA | | 1013- | | CACUUGGAGG | | 1011-1033 | |
| | | | 1033_C21U_s | | | | 1033_G1A_as | |
| AD- | AUUAGGCAACA | 44 | NM_016841.4_ | 1027-1047 | UUAUGAUGGAUGU | 119 | NM_016841.4_ | 1025-1047 |
| 523850.1 | UCCAUCAUAA | | 1027- | | UGCCUAAUGA | | 1025- | |
| | | | 1047_A21U_s | | | | 1047_U1A_as | |
| AD- | CUGAGCAAGGU | 45 | NM_016841.4_ | 998-1018 | UUUGGAGGUCACC | 120 | NM_016841.4_ | 996-1018 |
| 523820.1 | GACCUCCAAA | | 998- | | UUGCUCAGGU | | 996- | |
| | | | 1018_G21U_s | | | | 1018_C1A_as | |
| AD- | CAUUAGGCAAC | 46 | NM_016841.4_ | 1026-1046 | UAUGAUGGAUGUU | 121 | NM_016841.4_ | 1024-1046 |
| 523849.1 | AUCCAUCAUA | | 1026- | | GCCUAAUGAG | | 1024- | |
| | | | 1046_A21U_s | | | | 1046_U1A_as | |
| AD- | GGCUCAUUAGG | 47 | NM_016841.4_ | 1022-1042 | UUGGAUGUUGCCU | 122 | NM_016841.4_ | 1020-1042 |
| 523845.1 | CAACAUCCAA | | 1022-1042_s | | AAUGAGCCAC | | 1020-1042_as | |
| AD- | AGUGUGCAAAU | 48 | NM_ | 1065-1085 | UUUGUAGACUAUU | 123 | NM_ | 1063-1085 |
| 393758.3 | AGUCUACAAA | | 001038609.2_ | | UGCACACUGC | | 001038609.2_ | |
| | | | 1065-1085_ | | | | 1063-1085_ | |
| | | | G21U_s | | | | C1A_as | |
| AD- | UCAUUAGGCAA | 49 | NM_016841.4_ | 1025-1045 | UUGAUGGAUGUUG | 124 | NM_016841.4_ | 1023-1045 |
| 523848.1 | CAUCCAUCAA | | 1025-1045_s | | CCUAAUGAGC | | 1023-1045_as | |
| AD- | AGUGUGGCUCA | 50 | NM_016841.4_ | 1017-1037 | UGUUGCCUAAUGA | 125 | NM_016841.4_ | 1015-1037 |
| 523840.1 | UUAGGCAACA | | 1017- | | GCCACACUUG | | 1015- | |
| | | | 1037_A21U_s | | | | 1037_U1A_as | |
| AD- | GGUGACCUCCA | 51 | NM_016841.4_ | 1006-1026 | UAGCCACACUUGG | 126 | NM_016841.4_ | 1004-1026 |
| 523828.1 | AGUGUGGCUA | | 1006- | | AGGUCACCUU | | 1004- | |
| | | | 1026_C21U_s | | | | 1026_G1A_as | |
| AD- | GAGCAAGGUGA | 52 | NM_016841.4_ | 1000-1020 | UACUUGGAGGUCA | 127 | NM_016841.4_ | 998-1020 |
| 523822.1 | CCUCCAAGUA | | 1000- | | CCUUGCUCAG | | 998- | |
| | | | 1020_G21U_s | | | | 1020_C1A_as | |
| AD- | ACAAACCAGUU | 53 | NM_016841.4_ | 984-1004 | UGCUCAGGUCAAC | 128 | NM_016841.4_ | 982-1004 |
| 523806.1 | GACCUGAGCA | | 984- | | UGGUUUGUAG | | 982- | |
| | | | 1004_A21U_s | | | | 1004_U1A_as | |
| AD- | ACCUCCAAGUG | 54 | NM_016841.4_ | 1010-1030 | UAAUGAGCCACAC | 129 | NM_016841.4_ | 1008-1030 |
| 523831.1 | UGGCUCAUUA | | 1010- | | UUGGAGGUCA | | 1008- | |
| | | | 1030_A21U_s | | | | 1030_U1A_as | |
| AD- | CAGUGUGCAAA | 55 | NM_ | 1064-1084 | UUGUAGACUAUUU | 130 | NM_ | 1062-1084 |
| 393757.1 | UAGUCUACAA | | 001038609.2_ | | GCACACUGCC | | 001038609.2_ | |
| | | | 1064-1084_s | | | | 1062-1084_as | |
| AD- | AAGUGUGGCUC | 56 | NM_016841.4_ | 1016-1036 | UUUGCCUAAUGAG | 131 | NM_016841.4_ | 1014-1036 |
| 523839.1 | AUUAGGCAAA | | 1016- | | CCACACUUGG | | 1014- | |
| | | | 1036_C21U_s | | | | 1036_G1A_as | |
| AD- | UUGACCUGAGC | 57 | NM_016841.4_ | 993-1013 | UGGUCACCUUGCU | 132 | NM_016841.4_ | 991-1013 |
| 523815.1 | AAGGUGACCA | | 993-1013_s | | CAGGUCAACU | | 991-1013_as | |
| AD- | CAACAUCCAUC | 58 | NM_016841.4_ | 1033-1053 | UCUGGUUUAUGAU | 133 | NM_016841.4_ | 1031-1053 |
| 523856.1 | AUAAACCAGA | | 1033- | | GGAUGUUGCC | | 1031- | |
| | | | 1053_G21U_s | | | | 1053_C1A_as | |
| AD- | GUGCAAAUAGU | 59 | NM_016841.4_ | 971-991 | UGGUUUGUAGACU | 134 | NM_005910.5_ | 969-971 |
| 1019330.1 | CUACAAACCA | | 971- | | AUUUGCACAC | | 1236-1258_as | |
| | | | 991_A21U_s | | | | | |
| AD- | UGACCUCCAAG | 60 | NM_016841.4_ | 1008-1028 | UUGAGCCACACUU | 135 | NM_016841.4_ | 1006-1028 |
| 523829.1 | UGUGGCUCAA | | 1008-1028_s | | GGAGGUCACC | | 1006-1028_as | |
| AD- | GCAACAUCCAU | 61 | NM_016841.4_ | 1032-1052 | UUGGUUUAUGAUG | 136 | NM_016841.4_ | 1030-1052 |
| 523855.1 | CAUAAACCAA | | 1032- | | GAUGUUGCCU | | 1030- | |
| | | | 1052_G21U_s | | | | 1052_C1A_as | |
| AD- | CAAGUGUGGCU | 62 | NM_016841.4_ | 1015-1035 | UUGCCUAAUGAGC | 137 | NM_016841.4_ | 1013-1035 |
| 523836.1 | CAUUAGGCAA | | 1015- | | CACACUUGGA | | 1013- | |
| | | | 1035_A21U_s | | | | 1035_U1A_as | |
| AD- | GCAGUGUGCAA | 63 | NM_ | 1063-1083 | UGUAGACUAUUUG | 138 | NM_005910.5_ | 1061-1083 |
| 1019329.1 | AUAGUCUACA | | 001038609.2_ | | CACACUGCCG | | 1231-1253_as | |
| | | | 1063-1083_s | | | | | |
| AD- | GUGGCUCAUUA | 64 | NM_016841.4_ | 1020-1040 | UGAUGUUGCCUAA | 139 | NM_016841.4_ | 1018-1040 |
| 523843.1 | GGCAACAUCA | | 1020- | | UGAGCCACAC | | 1018- | |
| | | | 1040_C21U_s | | | | 1040_G1A_as | |
| AD- | CAAACCAGUUG | 65 | NM_016841.4_ | 985-1005 | UUGCUCAGGUCAA | 140 | NM_016841.4_ | 983-1005 |
| 523807.1 | ACCUGAGCAA | | 985- | | CUGGUUUGUA | | 983- | |
| | | | 1005_A21U_s | | | | 1005_U1A_as | |
| AD- | UGAGCAAGGUG | 66 | NM_016841.4_ | 999-1019 | UCUUGGAGGUCAC | 141 | NM_016841.4_ | 997-1019 |
| 523821.1 | ACCUCCAAGA | | 999-1019_s | | CUUGCUCAGG | | 997-1019_as | |
| AD- | AAGGUGACCUC | 67 | NM_016841.4_ | 1004-1024 | UCCACACUUGGAG | 142 | NM_016841.4_ | 1002-1024 |
| 523826.1 | CAAGUGUGGA | | 1004- | | GUCACCUUGC | | 1002- | |
| | | | 1024_C21U_s | | | | 1024_G1A_as | |
| AD- | CUCAUUAGGCA | 68 | NM_016841.4_ | 1024-1044 | UGAUGGAUGUUGC | 143 | NM_016841.4_ | 1022-1044 |
| 523847.1 | ACAUCCAUCA | | 1024- | | CUAAUGAGCC | | 1022- | |
| | | | 1044_A21U_s | | | | 1044_U1A_as | |
| AD- | GUGACCUCCAA | 69 | NM_ | 1104-1124 | UGAGCCACACUUG | 144 | NM_016841.4_ | 1102-1124 |
| 523786.1 | GUGUGGCUCA | | 001038609.2_ | | GAGGUCACCU | | 1005- | |
| | | | 1104-1124_ | | | | 1027_U1A_as | |
| | | | G21U_s | | | | | |
| AD- | CAGUUGACCUG | 70 | NM_016841.4_ | 990-1010 | UCACCUUGCUCAG | 145 | NM_016841.4_ | 988-1010 |
| 523812.1 | AGCAAGGUGA | | 990- | | GUCAACUGGU | | 988- | |
| | | | 1010_A21U_s | | | | 1010_U1A_as | |
| AD- | AGGUGACCUCC | 71 | NM_016841.4_ | 1005-1025 | UGCCACACUUGGA | 146 | NM_016841.4_ | 1003-1025 |
| 523827.1 | AAGUGUGGCA | | 1005-1025_s | | GGUCACCUUG | | 1003-1025_as | |
| AD- | UGGCUCAUUAG | 72 | NM_016841.4_ | 1021-1041 | UGGAUGUUGCCUA | 147 | NM_016841.4_ | 1019-1041 |
| 523844.1 | GCAACAUCCA | | 1021- | | AUGAGCCACA | | 1019- | |
| | | | 1041_A21U_s | | | | 1041_U1A_as | |
| AD- | UUAGGCAACAU | 73 | NM_016841.4_ | 1028-1048 | UUUAUGAUGGAUG | 148 | NM_016841.4_ | 1026-1048 |
| 523851.1 | CCAUCAUAAA | | 1028- | | UUGCCUAAUG | | 1026- | |
| | | | 1048_A21U_s | | | | 1048_U1A_as | |
| AD- | ACCUGAGCAAG | 74 | NM_016841.4_ | 996-1016 | UGGAGGUCACCUU | 149 | NM_016841.4_ | 994-1016 |
| 523818.1 | GUGACCUCCA | | 996- | | GCUCAGGUCA | | 994- | |
| | | | 1016_A21U_s | | | | 1016_U1A_as | |
| AD- | CCUCCAAGUGU | 75 | NM_016841.4_ | 1011-1031 | UUAAUGAGCCACA | 150 | NM_016841.4_ | 1009-1031 |
| 523832.1 | GGCUCAUUAA | | 1011- | | CUUGGAGGUC | | 1009- | |
| | | | 1031_G21U_s | | | | 1031_C1A_as | |
| AD- | AGUUGACCUGA | 76 | NM_016841.4_ | 991-1011 | UUCACCUUGCUCA | 151 | NM_016841.4_ | 989-1011 |
| 523813.1 | GCAAGGUGAA | | 991- | | GGUCAACUGG | | 989- | |
| | | | 1011_C21U_s | | | | 1011_G1A_as | |
| AD- | GUGUGGCUCAU | 77 | NM_016841.4_ | 1018-1038 | UUGUUGCCUAAUG | 152 | NM_016841.4_ | 1016-1038 |
| 523841.1 | UAGGCAACAA | | 1018-1038_s | | AGCCACACUU | | 1016-1038_as | |
| AD- | AGGCGGCAGUG | 78 | NM_005910.5_ | 1228-1248 | UCUAUUUGCACAC | 153 | NM_005910.5_ | 1226-1248 |
| 1019352.1 | UGCAAAUAGA | | 1228- | | UGCCGCCUCC | | 1226- | |
| | | | 1248_U21A_s | | | | 1248_A1U_as | |
| AD- | GCGGCAGUGUG | 79 | NM_005910.5_ | 1230-1250 | UGACUAUUUGCAC | 154 | NM_005910.5_ | 1228-1250 |
| 1019354.1 | CAAAUAGUCA | | 1230- | | ACUGCCGCCU | | 1228- | |
| | | | 1250_U21A_s | | | | 1250_A1U_as | |
| AD- | UAGGCAACAUC | 80 | NM_016841.4_ | 1029-1049 | UUUUAUGAUGGAU | 155 | NM_016841.4_ | 1027-1049 |
| 523852.1 | CAUCAUAAAA | | 1029- | | GUUGCCUAAU | | 1027- | |
| | | | 1049_C21U_s | | | | 1049_G1A_as | |
| AD- | UGUGGCUCAUU | 81 | NM_016841.4_ | 1019-1039 | UAUGUUGCCUAAU | 156 | NM_016841.4_ | 1017-1039 |
| 523842.1 | AGGCAACAUA | | 1019- | | GAGCCACACU | | 1017- | |
| | | | 1039_C21U_s | | | | 1039_G1A_as | |
| AD- | CUCCAAGUGUG | 82 | NM_016841.4_ | 1012-1032 | UCUAAUGAGCCAC | 157 | NM_016841.4_ | 1010-1032 |
| 523833.1 | GCUCAUUAGA | | 1012- | | ACUUGGAGGU | | 1010- | |
| | | | 1032_G21U_s | | | | 1032_C1A_as | |
| AD- | GGCAGUGUGCA | 83 | NM_00103860 | 1062-1082 | UUAGACUAUUUGC | 158 | NM_005910.5_ | 1060-1082 |
| 1019328.1 | AAUAGUCUAA | | 9.2_1062- | | ACACUGCCGC | | 1230- | |
| | | | 1082_C21U_s | | | | 1252_G1U_as | |
| AD- | CGGCAGUGUGC | 84 | NM_005910.5_ | 1231-1251 | UAGACUAUUUGCA | 159 | NM_005910.5_ | 1229-1251 |
| 1019355.1 | AAAUAGUCUA | | 1231-1251_s | | CACUGCCGCC | | 1229-1251_as | |
| AD- | GGCGGCAGUGU | 85 | NM_005910.5_ | 1229-1249 | UACUAUUUGCACA | 160 | NM_005910.5_ | 1227-1249 |
| 1019353.1 | GCAAAUAGUA | | 1229- | | CUGCCGCCUC | | 1227- | |
| | | | 1249_C21A_s | | | | 1249_G1U_as | |
| AD- | GGAGGCGGCAG | 86 | NM_005910.5_ | 1226-1246 | UAUUUGCACACUG | 161 | NM_005910.5_ | 1224-1246 |
| 1019350.1 | UGUGCAAAUA | | 1226-1246_s | | CCGCCUCCCG | | 1224-1246_as | |
| AD- | GAGGCGGCAGU | 87 | NM_005910.5_ | 1227-1247 | UUAUUUGCACACU | 162 | NM_005910.5_ | 1225-1247 |
| 1019351.1 | GUGCAAAUAA | | 1227- | | GCCGCCUCCC | | 1225- | |
| | | | 1247_G21A_s | | | | 1247_C1U_as | |

TABLE 4
Unmodified Sense and Antisense Strand Sequences of MAPT dsRNA Agents- Screen 2

| | Sense | SEQ | | Range in | Antisense | SEQ | Source | Range in |
|---|---|---|---|---|---|---|---|---|
| Duplex | Sequence | ID | Source and | NM_ | Sequence | ID | and | NM_ |
| Name | 5′ to 3′ | NO: | Range | 016841.4 | 5′ to 3′ | NO: | Range | 016841.4 |
| AD- | AGCUCGCAU | 388 | NM_016841.4_ | 520-540 | UUUUUACUGAC | 476 | NM_016841.4_ | 518-540 |
| 535094.1 | GGUCAGUA | | 520-540_ | | CAUGCGAGCUU | | 518-540_ | |
| | AAAA | | G21U_s | | G | | C1A_as | |
| AD- | GCUCGCAUG | 389 | NM_016841.4_ | 521-541 | UCUUUUACUGA | 477 | NM_016841.4_ | 519-541 |
| 535095.1 | GUCAGUAA | | 521-541_ | | CCAUGCGAGCUU | | 519-541_ | |
| | AAGA | | C21U_s | | | | G1A_as | |
| AD- | UAUUGUGU | 390 | NM_016841.4_ | 5464-5484 | UAUUUGTUAAA | 478 | NM_016841.4_ | 5462-5484 |
| 538647.1 | GUUUUAAC | | 5464- | | ACACACAAUACA | | 5462- | |
| | AAAUA | | 5484_G21U_s | | | | 5484_C1A_as | |
| AD- | CAGCAACAA | 391 | NM_016841.4_ | 1813-1833 | UUUUCAAAUCC | 479 | NM_016841.4_ | 1811-1833 |
| 535922.1 | AGGAUUUG | | 1813- | | UUUGUUGCUGC | | 1811- | |
| | AAAA | | 1833_C21U_s | | C | | 1833_G1A_as | |
| AD- | GCUAACCAG | 392 | NM_016841.4_ | 2378-2398 | UUACAAAGAGA | 480 | NM_016841.4_ | 2376-2398 |
| 536317.1 | UUCUCUUUG | | 2378- | | ACUGGUUAGCCC | | 2376- | |
| | UAA | | 2398_A21U_s | | | | 2398_U1A_as | |
| AD- | UAGUUGGA | 393 | NM_016841.4_ | 3242-3262 | UUAAACAGACA | 481 | NM_016841.4_ | 3240-3262 |
| 536911.1 | UUUGUCUG | | 3242-3262_s | | AAUCCAACUACA | | 3240-3262_as | |
| | UUUAA | | | | | | | |
| AD- | GUCUGUGA | 394 | NM_016841.4_ | 5442-5462 | UCUAUATAGACA | 482 | NM_016841.4_ | 5440-5462 |
| 538626.1 | AUGUCUAU | | 5442-5462_s | | UUCACAGACAG | | 5440-5462_as | |
| | AUAGA | | | | | | | |
| AD- | CAGGCAAUU | 395 | NM_016841.4_ | 1665-1685 | UGAAUCAAAAG | 483 | NM_016841.4_ | 1663-1685 |
| 535864.1 | CCUUUUGAU | | 1665-1685_s | | GAAUUGCCUGA | | 1663-1685_as | |
| | UCA | | | | G | | | |
| AD- | CAACAAAGG | 396 | NM_016841.4_ | 1816-1836 | UAAGUUTCAAAU | 484 | NM_016841.4_ | 1814-1836 |
| 535925.1 | AUUUGAAA | | 1816- | | CCUUUGUUGCU | | 1814- | |
| | CUUA | | 1836_G21U_s | | | | 1836_C1A_as | |
| AD- | GCUGACUCA | 397 | NM_016841.4_ | 4667-4687 | UUAUUGAUAAA | 485 | NM_016841.4_ | 4665-4687 |
| 538012.1 | CUUUAUCAA | | 4667- | | GUGAGUCAGCA | | 4665- | |
| | UAA | | 4687_G21U_s | | G | | 4687_C1A_as | |
| AD- | GCAGCUGAA | 398 | NM_016841.4_ | 3183-3203 | UCUAUGTAUAUG | 486 | NM_016841.4_ | 3181-3203 |
| 536872.1 | CAUAUACAU | | 3183- | | UUCAGCUGCUC | | 3181- | |
| | AGA | | 3203_A21U_s | | | | 3203_U1A_as | |
| AD- | AGGACGCAU | 399 | NM_ | 3422-3442 | UUUUCAAGAUA | 487 | NM_016841.4_ | 3420-3442 |
| 536954.1 | GUAUCUUG | | 001038609.2_ | | CAUGCGUCCUUU | | 3314-3336_as | |
| | AAAA | | 3422-3442_s | | | | | |
| AD- | UAUCUUGA | 400 | NM_016841.4_ | 3326-3346 | UUUUACAAGCA | 488 | NM_016841.4_ | 3324-3346 |
| 536964.1 | AAUGCUUG | | 326- | | UUUCAAGAUAC | | 3324- | |
| | UAAAA | | 33346_G21U_s | | A | | 3346_C1A_as | |
| AD- | CUAACCAGU | 401 | NM_016841.4_ | 2379-2399 | UUUACAAAGAG | 489 | NM_016841.4_ | 2377-2399 |
| 536318.1 | UCUCUUUGU | | 2379- | | AACUGGUUAGC | | 2377- | |
| | AAA | | 2399_G21U_s | | C | | 2399_C1A_as | |
| AD- | CUUGUAAA | 402 | NM_016841.4_ | 3338-3358 | UGUUAGAAACC | 490 | NM_016841.4_ | 3336-3358 |
| 536976.1 | GAGGUUUC | | 3338- | | UCUUUACAAGC | | 3336- | |
| | UAACA | | 3358_C21U_s | | A | | 3358_G1A_as | |
| AD- | GUGAAUGU | 403 | NM_016841.4_ | 5446-5466 | UUACACTAUAUA | 491 | NM_016841.4_ | 5444-5466 |
| 538630.1 | CUAUAUAG | | 5446-5466_s | | GACAUUCACAG | | 5444-5466_as | |
| | UGUAA | | | | | | | |
| AD- | CUGUCUGUG | 404 | NM_016841.4_ | 5440-5460 | UAUAUAGACAU | 492 | NM_016841.4_ | 5438-5460 |
| 538624.1 | AAUGUCUA | | 5440- | | UCACAGACAGA | | 5438- | |
| | UAUA | | 5460_A21U_s | | A | | 5460_U1A_as | |
| AD- | AGGGACAU | 405 | NM_016841.4_ | 5410-5430 | UUAAGATGAUU | 493 | NM_016841.4_ | 5408-5430 |
| 538594.1 | GAAAUCAUC | | 5410- | | UCAUGUCCCUCC | | 5408- | |
| | UUAA | | 5430_G21U_s | | | | 5430_C1A_as | |
| AD- | UGGAUUUG | 406 | NM_016841.4_ | 3246-3266 | UAGCAUAAACA | 494 | NM_016841.4_ | 3244-3266 |
| 536915.1 | UCUGUUUA | | 3246-3266_s | | GACAAAUCCAAC | | 3244-3266_as | |
| | UGCUA | | | | | | | |
| AD- | GAGCAGCUG | 407 | NM_016841.4_ | 3181-3201 | UAUGUATAUGU | 495 | NM_016841.4_ | 3179-3201 |
| 536870.1 | AACAUAUAC | | 3181- | | UCAGCUGCUCCA | | 3179- | |
| | AUA | | 3201_A21U_s | | | | 3201_U1A_as | |
| AD- | ACAGAAACC | 408 | NM_016841.4_ | 2297-2317 | UCAAUAAAACA | 496 | NM_016841.4_ | 2295-2317 |
| 536236.1 | CUGUUUUA | | 2297- | | GGGUUUCUGUG | | 2295- | |
| | UUGA | | 2317_A21U_s | | G | | 2317_U1A_as | |
| AD- | UAACCAGUU | 409 | NM_016841.4_ | 2380-2400 | UCUUACAAAGA | 497 | NM_016841.4_ | 2378-2400 |
| 536319.1 | CUCUUUGUA | | 2380- | | GAACUGGUUAG | | 2378- | |
| | AGA | | 2400_G21U_s | | C | | 2400_C1A_as | |
| AD- | UCUUGAAA | 410 | NM_016841.4_ | 3328-3348 | UUCUUUACAAG | 498 | NM_016841.4_ | 3326-3348 |
| 536966.1 | UGCUUGUA | | 3328- | | CAUUUCAAGAU | | 3326- | |
| | AAGAA | | 3348_G21U_s | | A | | 3348_C1A_as | |
| AD- | AGUGUAUU | 411 | NM_016841.4_ | 5460-5480 | UGUUAAAACAC | 499 | NM_016841.4_ | 5458-5480 |
| 538643.1 | GUGUGUUU | | 5460- | | ACAAUACACUA | | 5458- | |
| | UAACA | | 5480_A21U_s | | U | | 5480_U1A_as | |
| AD- | CAGCUGAAC | 412 | NM_016841.4_ | 3184-3204 | UUCUAUGUAUA | 500 | NM_016841.4_ | 3182-3204 |
| 536873.1 | AUAUACAU | | 3184-3204_s | | UGUUCAGCUGC | | 3182-3204_as | |
| | AGAA | | | | U | | | |
| AD- | AAAGGACGC | 413 | NM_ | 3420-3440 | UUCAAGAUACA | 501 | NM_016841.4_ | 3418-3440 |
| 536952.1 | AUGUAUCU | | 001038609.2_ | | UGCGUCCUUUU | | 3312- | |
| | UGAA | | 3420-3440_s | | U | | 3334_U1A_as | |
| AD- | GCAUGUAUC | 414 | NM_016841.4_ | 3321-3341 | UAAGCATUUCAA | 502 | NM_016841.4_ | 3319-3341 |
| 536959.1 | UUGAAAUG | | 3321- | | GAUACAUGCGU | | 3319- | |
| | CUUA | | 3341_G21U_s | | | | 3341_C1A_as | |
| AD- | ACGCUGGCU | 415 | NM_016841.4_ | 4529-4549 | UUUAAGAUCAC | 503 | NM_016841.4_ | 4527-4549 |
| 537921.1 | UGUGAUCU | | 4529- | | AAGCCAGCGUGC | | 4527- | |
| | UAAA | | 4549_A21U_s | | | | 4549_U1A_as | |
| AD- | UUUUAACA | 416 | NM_016841.4_ | 5473-5493 | UGUGUAAAUCA | 504 | NM_016841.4_ | 5471-5493 |
| 538652.1 | AAUGAUUU | | 5473-5493_s | | UUUGUUAAAAC | | 5471-5493_as | |
| | ACACA | | | | A | | | |
| AD- | UUGUGUGU | 417 | NM_016841.4_ | 5466-5486 | UUCAUUTGUUAA | 505 | NM_016841.4_ | 5464-5486 |
| 538649.1 | UUUAACAA | | 5466-5486_s | | AACACACAAUA | | 5464-5486_as | |
| | AUGAA | | | | | | | |
| AD- | UCUGUCUGU | 418 | NM_016841.4_ | 5439-5459 | UUAUAGACAUU | 506 | NM_016841.4_ | 5437-5459 |
| 538623.1 | GAAUGUCU | | 5439-5459_s | | CACAGACAGAA | | 5437-5459_as | |
| | AUAA | | | | A | | | |
| AD- | GCAAGUCCC | 419 | NM_016841.4_ | 5369-5389 | UGAAGAAAUCA | 507 | NM_016841.4_ | 5367-5389 |
| 538573.1 | AUGAUUUC | | 5369- | | UGGGACUUGCA | | 5367- | |
| | UUCA | | 5389_G21U_s | | A | | 5389_C1A_as | |
| AD- | CACGCUGGC | 420 | NM_016841.4_ | 4528-4548 | UUAAGATCACAA | 508 | NM_016841.4_ | 4526-4548 |
| 537920.1 | UUGUGAUC | | 4528- | | GCCAGCGUGCC | | 4526- | |
| | UUAA | | 4548_A21U_s | | | | 4548_U1A_as | |
| AD- | UUCACCAGA | 421 | NM_ | 3338-3358 | UAUCAUAGUCA | 509 | NM_016841.4_ | 3336-3358 |
| 536939.1 | GUGACUAU | | 001038609.2_ | | CUCUGGUGAAU | | 3268- | |
| | GAUA | | 3338-3358_s | | C | | 3290_U1A_as | |
| AD- | GACUCACUU | 422 | NM_016841.4_ | 4670-4690 | UAACUATUGAUA | 510 | NM_016841.4_ | 4668-4690 |
| 538015.1 | UAUCAAUA | | 4670- | | AAGUGAGUCAG | | 6468- | |
| | GUUA | | 4690_C21U_s | | | | 4690_G1A_as | |
| AD- | AAGGACGCA | 423 | NM_ | 3421-3441 | UUUCAAGAUAC | 511 | NM_016841.4_ | 3419-3441 |
| 536953.1 | UGUAUCUU | | 001038609.2_ | | AUGCGUCCUUU | | 3313- | |
| | GAAA | | 3421-3441_s | | U | | 3335_U1A_as | |
| AD- | CAGAAACCC | 424 | NM_016841.4_ | 2298-2318 | UUCAAUAAAAC | 512 | NM_016841.4_ | 2296-2318 |
| 536237.1 | UGUUUUAU | | 2298- | | AGGGUUUCUGU | | 2296- | |
| | UGAA | | 2318_G21U_s | | G | | 2318_C1A_as | |
| AD- | CUGUGAAU | 425 | NM_016841.4_ | 5444-5464 | UCACUATAUAGA | 513 | NM_016841.4_ | 5442-5464 |
| 538628.1 | GUCUAUAU | | 5444-5464_s | | CAUUCACAGAC | | 5442-5464_as | |
| | AGUGA | | | | | | | |
| AD- | GAAUGUCU | 426 | NM_016841.4_ | 5448-5468 | UAAUACACUAU | 514 | NM_016841.4_ | 5446-5468 |
| 538632.1 | AUAUAGUG | | 5448- | | AUAGACAUUCA | | 5446- | |
| | UAUUA | | 5468_G21U_s | | C | | 5468_C1A_as | |
| AD- | GCUUGUAA | 427 | NM_016841.4_ | 3337-3357 | UUUAGAAACCU | 515 | NM_016841.4_ | 3335-3357 |
| 536975.1 | AGAGGUUU | | 3337- | | CUUUACAAGCA | | 3335- | |
| | CUAAA | | 3357_C21U_s | | U | | 3357_G1A_as | |
| AD- | CAUGAAAUC | 428 | NM_016841.4_ | 5415-5435 | UUAAGCTAAGAU | 516 | NM_016841.4_ | 5413-5435 |
| 538599.1 | AUCUUAGCU | | 5415- | | GAUUUCAUGUC | | 5413- | |
| | UAA | | 5435_G21U_s | | | | 5435_C1A_as | |
| AD- | UGUAAAGA | 429 | NM_016841.4_ | 3340-3360 | UGGGUUAGAAA | 517 | NM_016841.4_ | 3338-3360 |
| 536978.1 | GGUUUCUA | | 3340- | | CCUCUUUACAAG | | 3338- | |
| | ACCCA | | 3360_A21U_s | | | | 3360_U1A_as | |
| AD- | GACGCAUGU | 430 | NM_016841.4_ | 3318-3338 | UCAUUUCAAGA | 518 | NM_016841.4_ | 3316-3338 |
| 536956.1 | AUCUUGAA | | 3318- | | UACAUGCGUCCU | | 3316- | |
| | AUGA | | 3338_C21U_s | | | | 3338_G1A_as | |
| AD- | UUGCAAGUC | 431 | NM_ | 5207-5227 | UAGAAATCAUGG | 519 | NM_016841.4_ | 5205-5227 |
| 538571.1 | CCAUGAUUU | | 001038609.2_ | | GACUUGCAAGU | | 5365-5387_as | |
| | CUA | | 5207-5227_s | | | | | |
| AD- | GCAGCAACA | 432 | NM_016841.4_ | 1812-1832 | UUUCAAAUCCU | 520 | NM_016841.4_ | 1810-1832 |
| 535921.1 | AAGGAUUU | | 1812- | | UUGUUGCUGCC | | 1810- | |
| | GAAA | | 1832_A21U_s | | A | | 1832_U1A_as | |
| AD- | GAGGGACA | 433 | NM_016841.4_ | 5409-5429 | UAAGAUGAUUU | 521 | NM_016841.4_ | 5407-5429 |
| 538593.1 | UGAAAUCA | | 5409- | | CAUGUCCCUCCC | | 5407- | |
| | UCUUA | | 5429_A21U_s | | | | 5429_U1A_as | |
| AD- | GCUAGAUA | 434 | NM_016841.4_ | 4629-4649 | UUACAGTAUAUC | 522 | NM_016841.4_ | 4627-4649 |
| 537974.1 | GGAUAUAC | | 4629-4649_s | | CUAUCUAGCCC | | 6427-4649_as | |
| | UGUAA | | | | | | | |
| AD- | GGCUAGAU | 435 | NM_016841.4_ | 4628-4648 | UACAGUAUAUC | 523 | NM_016841.4_ | 4626-4648 |
| 537973.1 | AGGAUAUA | | 4628- | | CUAUCUAGCCCA | | 4626- | |
| | CUGUA | | 4648_A21U_s | | | | 4648_U1A_as | |
| AD- | AAGAGGUU | 436 | NM_016841.4_ | 3344-3364 | UGGGUGGGUUA | 524 | NM_016841.4_ | 3342-3364 |
| 536982.1 | UCUAACCCA | | 3344-3364_s | | GAAACCUCUUU | | 3342-3364_as | |
| | CCCA | | | | A | | | |
| AD- | GUGGCAGCA | 437 | NM_016841.4_ | 1809-1829 | UAAAUCCUUUG | 525 | NM_016841.4_ | 1807-1829 |
| 535918.1 | ACAAAGGA | | 1809- | | UUGCUGCCACUG | | 1807- | |
| | UUUA | | 1829_G21U_s | | | | 1829_C1A_as | |
| AD- | UCUGUGAA | 438 | NM_016841.4_ | 5443-5463 | UACUAUAUAGA | 526 | NM_016841.4_ | 5441-5463 |
| 538627.1 | UGUCUAUA | | 5443- | | CAUUCACAGACA | | 5441- | |
| | UAGUA | | 5463_G21U_s | | | | 5463_C1A_as | |
| AD- | GUUGGAUU | 439 | NM_016841.4_ | 3244-3264 | UCAUAAACAGA | 527 | NM_016841.4_ | 3242-3264 |
| 536913.1 | UGUCUGUU | | 3244- | | CAAAUCCAACUA | | 3242- | |
| | UAUGA | | 3264_C21U_s | | | | 3264_G1A_as | |
| AD- | GGAGCAGCU | 440 | NM_016841.4_ | 3180-3200 | UUGUAUAUGUU | 528 | NM_016841.4_ | 3178-3200 |
| 536869.1 | GAACAUAU | | 3180-3200_s | | CAGCUGCUCCAG | | 3178-3200_as | |
| | ACAA | | | | | | | |
| AD- | AUCUUGAA | 441 | NM_016841.4_ | 3327-3347 | UCUUUACAAGC | 529 | NM_016841.4_ | 3325-3347 |
| 536965.1 | AUGCUUGU | | 3327- | | AUUUCAAGAUA | | 3325- | |
| | AAAGA | | 3347_A21U_s | | C | | 3347_U1A_as | |
| AD- | AAAAGGCAC | 442 | NM_016841.4_ | 4522-4542 | UCACAAGCCAGC | 530 | NM_016841.4_ | 4520-4542 |
| 537914.1 | GCUGGCUUG | | 4522- | | GUGCCUUUUCA | | 4520- | |
| | UGA | | 4542_A21U_s | | | | 4542_U1A_as | |
| AD- | CCAUACUGA | 443 | NM_016841.4_ | 2667-2687 | UUAAUUTCACCC | 531 | NM_016841.4_ | 2665-2687 |
| 536504.1 | GGGUGAAA | | 2667- | | UCAGUAUGGAG | | 2665- | |
| | UUAA | | 2687_A21U_s | | | | 2687_U1A_as | |
| AD- | CUGACUCAC | 444 | NM_016841.4_ | 4668-4688 | UCUAUUGAUAA | 532 | NM_016841.4_ | 4666-4688 |
| 538013.1 | UUUAUCAA | | 4668-4688_s | | AGUGAGUCAGC | | 4666-4688_as | |
| | UAGA | | | | A | | | |
| AD- | UUCUGGUU | 445 | NM_016841.4_ | 4083-4103 | UUAACUGUACCC | 533 | NM_016841.4_ | 4081-4103 |
| 537579.1 | UGGGUACA | | 4083- | | AAACCAGAAGU | | 0481- | |
| | GUUAA | | 4103_A21U_s | | | | 4103_U1A_as | |
| AD- | UGUGAAUG | 446 | NM_016841.4_ | 5445-5465 | UACACUAUAUA | 534 | NM_016841.4_ | 5443-5465 |
| 538629.1 | UCUAUAUA | | 5445- | | GACAUUCACAG | | 5443- | |
| | GUGUA | | 5465_A21U_s | | A | | 5465_U1A_as | |
| AD- | UCCACAGAA | 447 | NM_016841.4_ | 2294-2314 | UUAAAACAGGG | 535 | NM_016841.4_ | 2292-2314 |
| 536233.1 | ACCCUGUUU | | 2294-2314_s | | UUUCUGUGGAG | | 2292-2314_as | |
| | UAA | | | | C | | | |
| AD- | GAUUUCAAC | 448 | NM_016841.4_ | 4842-4862 | UUAGCAAAUGU | 536 | NM_016841.4_ | 4840-4862 |
| 538141.1 | CACAUUUGC | | 8442- | | GGUUGAAAUCA | | 4840- | |
| | UAA | | 4862_G21U_s | | U | | 4862_C1A_as | |
| AD- | UUCUGUCUG | 449 | NM_016841.4_ | 5438-5458 | UAUAGACAUUC | 537 | NM_016841.4_ | 5436-5458 |
| 538622.1 | UGAAUGUC | | 5438- | | ACAGACAGAAA | | 5436- | |
| | UAUA | | 5458_A21U_s | | G | | 5458_U1A_as | |
| AD- | UCUGGUUU | 450 | NM_016841.4_ | 4084-4104 | UUUAACTGUACC | 538 | NM_016841.4_ | 4082-4104 |
| 537580.1 | GGGUACAG | | 4084- | | CAAACCAGAAG | | 4082- | |
| | UUAAA | | 4104_A21U_s | | | | 4104_U1A_as | |
| AD- | CAUACUGAG | 451 | NM_016841.4_ | 2668-2688 | UUUAAUTUCACC | 539 | NM_016841.4_ | 2666-2688 |
| 536505.1 | GGUGAAAU | | 2668- | | CUCAGUAUGGA | | 2666- | |
| | UAAA | | 2688_G21U_s | | | | 2688_C1A_as | |
| AD- | GGCACGCUG | 452 | NM_016841.4_ | 4526-4546 | UAGAUCACAAG | 540 | NM_016841.4_ | 4524-4546 |
| 537918.1 | GCUUGUGA | | 4526-4546_s | | CCAGCGUGCCUU | | 4524-4546_as | |
| | UCUA | | | | | | | |
| AD- | GAAAAGGC | 453 | NM_016841.4_ | 4521-4541 | UACAAGCCAGCG | 541 | NM_016841.4_ | 4519-4541 |
| 537913.1 | ACGCUGGCU | | 5421- | | UGCCUUUUCAA | | 4519- | |
| | UGUA | | 4541_G21U_s | | | | 4541_C1A_as | |
| AD- | UAGUGUAU | 454 | NM_016841.4_ | 5459-5479 | UUUAAAACACA | 542 | NM_016841.4_ | 5457-5479 |
| 538642.1 | UGUGUGUU | | 5459- | | CAAUACACUAU | | 5457- | |
| | UUAAA | | 5479_C21U_s | | A | | 5479_G1A_as | |
| AD- | UGAACAUA | 455 | NM_016841.4_ | 3188-3208 | UAACAUCUAUG | 543 | NM_016841.4_ | 3186-3208 |
| 536877.1 | UACAUAGA | | 3188- | | UAUAUGUUCAG | | 3186- | |
| | UGUUA | | 3208_G21U_s | | C | | 3208_C1A_as | |
| AD- | UGUGUGUU | 456 | NM_016841.4_ | 5467-5487 | UAUCAUTUGUUA | 544 | NM_016841.4_ | 5465-5487 |
| 538650.1 | UUAACAAA | | 5467-5487_s | | AAACACACAAU | | 5465-5487_as | |
| | UGAUA | | | | | | | |
| AD- | UGUCUGUG | 457 | NM_016841.4_ | 5441-5461 | UUAUAUAGACA | 545 | NM_016841.4_ | 5439-5461 |
| 538625.1 | AAUGUCUA | | 5441- | | UUCACAGACAG | | 5439- | |
| | UAUAA | | 5461_G21U_s | | A | | 5461_C1A_as | |
| AD- | UUGAAAAG | 458 | NM_016841.4_ | 4519-4539 | UAAGCCAGCGU | 546 | NM_016841.4_ | 4517-4539 |
| 537911.1 | GCACGCUGG | | 4519- | | GCCUUUUCAAU | | 4517- | |
| | CUUA | | 4539_G21U_s | | U | | 4539_C1A_as | |
| AD- | UGACUCACU | 459 | NM_016841.4_ | 4669-4689 | UACUAUTGAUAA | 547 | NM_016841.4_ | 4667-4689 |
| 538014.1 | UUAUCAAU | | 4669-4689_s | | AGUGAGUCAGC | | 4667-4689_as | |
| | AGUA | | | | | | | |
| AD- | AUGUCUAU | 460 | NM_016841.4_ | 5450-5470 | UACAAUACACU | 548 | NM_016841.4_ | 5448-5470 |
| 538634.1 | AUAGUGUA | | 5450- | | AUAUAGACAUU | | 5448- | |
| | UUGUA | | 5470_G21U_s | | c | | 5470_C1A_as | |
| AD- | GUAAAGAG | 461 | NM_016841.4_ | 3341-3361 | UUGGGUTAGAA | 549 | NM_016841.4_ | 3339-3361 |
| 536979.1 | GUUUCUAAC | | 3341- | | ACCUCUUUACAA | | 3339- | |
| | CCAA | | 3361_C21U_s | | | | 3361_G1A_as | |
| AD- | AUAGUGUA | 462 | NM_016841.4_ | 5458-5478 | UUAAAACACAC | 550 | NM_016841.4_ | 5456-5478 |
| 538641.1 | UUGUGUGU | | 5458- | | AAUACACUAUA | | 5456- | |
| | UUUAA | | 5478_A21U_s | | U | | 5478_U1A_as | |
| AD- | UGAAAAGG | 463 | NM_016841.4_ | 4520-4540 | UCAAGCCAGCGU | 551 | NM_016841.4_ | 4518-4540 |
| 537912.1 | CACGCUGGC | | 4520-4540_s | | GCCUUUUCAAU | | 4518-4540_as | |
| | UUGA | | | | | | | |
| AD- | CUCAUUACU | 464 | NM_016841.4_ | 4329-4349 | UAAACUGUUGG | 552 | NM_016841.4_ | 4327-4349 |
| 537761.1 | GCCAACAGU | | 4329- | | CAGUAAUGAGG | | 4327- | |
| | UUA | | 4349_C21U_s | | G | | 4349_G1A_as | |
| AD- | AGGCACGCU | 465 | NM_016841.4_ | 4525-4545 | UGAUCACAAGCC | 553 | NM_016841.4_ | 4523-4545 |
| 537917.1 | GGCUUGUG | | 4525-4545_s | | AGCGUGCCUUU | | 4523-4545_as | |
| | AUCA | | | | | | | |
| AD- | AAGGCACGC | 466 | NM_016841.4_ | 4524-4544 | UAUCACAAGCCA | 554 | NM_016841.4_ | 4522-4544 |
| 537916.1 | UGGCUUGU | | 4524- | | GCGUGCCUUUU | | 4522- | |
| | GAUA | | 4544_C21U_s | | | | 4544_G1A_as | |
| AD- | GAUCACCUG | 467 | NM_016841.4_ | 5208-5228 | UGAUGGGACAC | 555 | NM_016841.4_ | 5206-5228 |
| 538432.1 | CGUGUCCCA | | 5208-5228_s | | GCAGGUGAUCA | | 5206-5228_as | |
| | UCA | | | | C | | | |
| AD- | CUCACCUCC | 468 | NM_016841.4_ | 5305-5325 | UUAAGUCUAUU | 556 | NM_016841.4_ | 5303-5325 |
| 538529.1 | UAAUAGAC | | 3505- | | AGGAGGUGAGG | | 5303- | |
| | UUAA | | 5325_G21U_s | | C | | 5325_C1A_as | |
| AD- | CAGCCUAAG | 469 | NM_016841.4_ | 4475-4495 | UUAAACCAUGA | 557 | NM_016841.4_ | 4473-4495 |
| 537867.1 | AUCAUGGU | | 4475- | | UCUUAGGCUGG | | 4473- | |
| | UUAA | | 4495_G21U_s | | C | | 4495_C1A_as | |
| AD- | UCCAUACUG | 470 | NM_016841.4_ | 2666-2686 | UAAUUUCACCCU | 558 | NM_016841.4_ | 2664-2686 |
| 536503.1 | AGGGUGAA | | 2666- | | CAGUAUGGAGU | | 2664- | |
| | AUUA | | 2686_A21U_s | | | | 2686_U1A_as | |
| AD- | UGGUUUGG | 471 | NM_016841.4_ | 4086-4106 | UCUUUAACUGU | 559 | NM_016841.4_ | 4084-4106 |
| 537582.1 | GUACAGUU | | 4086- | | ACCCAAACCAGA | | 4084- | |
| | AAAGA | | 4106_G21U_s | | | | 4106_C1A_as | |
| AD- | AAAGGCACG | 472 | NM_016841.4_ | 4523-4543 | UUCACAAGCCAG | 560 | NM_016841.4_ | 4521-4543 |
| 537915.1 | CUGGCUUGU | | 4523-4543_s | | CGUGCCUUUUC | | 4521-4543_as | |
| | GAA | | | | | | | |
| AD- | GCACGCUGG | 473 | NM_016841.4_ | 4527-4547 | UAAGAUCACAA | 561 | NM_016841.4_ | 4525-4547 |
| 537919.1 | CUUGUGAUC | | 4527- | | GCCAGCGUGCCU | | 4525- | |
| | UUA | | 4547_A21U_s | | | | 4547_U1A_as | |
| AD- | CUGGUUUG | 474 | NM_016841.4_ | 4085-4105 | UUUUAACUGUA | 562 | NM_016841.4_ | 4083-4105 |
| 537581.1 | GGUACAGU | | 4085- | | CCCAAACCAGAA | | 4083- | |
| | UAAAA | | 4105_G21U_s | | | | 4105_C1A_as | |
| AD- | UUCUCUUCA | 475 | NM_016841.4_ | 5259-5279 | UCUUUUCAAAG | 563 | NM_016841.4_ | 5257-5279 |
| 538483.1 | GCUUUGAA | | 5259- | | CUGAAGAGAAA | | 5257- | |
| | AAGA | | 5279_G21U_s | | U | | 5279_C1A_as | |

TABLE 5
Unmodified Sense and Antisense Strand Sequences of MAPT dsRNA Agents-Screen 3

| | | | | Range | | | | Range |
|---|---|---|---|---|---|---|---|---|
| | Sense | SEQ | | in | Antisense | SEQ | | in |
| Duplex | Sequence | ID | Source and | NM_ | Sequence | ID | Source | NM_ |
| Name | 5′ to 3′ | NO: | Range | 016841.4 | 5′ to 3′ | NO: | and Range | 016841.4 |
| AD- | AGCUCGCAUGG | 828 | NM_016841.4_ | 520-540 | UUUUUACUGACC | 921 | NM_016841.4_ | 518-540 |
| 523561.1 | UCAGUAAAAA | | 520- | | AUGCGAGCUUG | | 518-540_ | |
| | | | 540_G21U_s | | | | C1A_as | |
| AD- | CGCAUGGUCAG | 829 | NM_016841.4_ | 524-544 | UUUGCUUUUACU | 922 | NM_016841.4_ | 522-544 |
| 523565.1 | UAAAAGCAAA | | 524- | | GACCAUGCGAG | | 522-544_ | |
| | | | 544_A21U_s | | | | U1A_as | |
| AD- | GCUCGCAUGGU | 830 | NM_016841.4_ | 521-541 | UCUUUUACUGAC | 923 | NM_016841.4_ | 519-541 |
| 523562.1 | CAGUAAAAGA | | 521- | | CAUGCGAGCUU | | 519-541_ | |
| | | | 541_C21U_s | | | | G1A_as | |
| AD- | UUGCAAGUCCC | 831 | NM_ | 5207-5227 | UAGAAAUCAUGG | 924 | NM_016841.4_ | 5205-5227 |
| 526914.1 | AUGAUUUCUA | | 001038609.2_ | | GACUUGCAAGU | | 5365- | |
| | | | 5207-5227_s | | | | 5387_as | |
| AD- | GACUCACUUUA | 832 | NM_016841.4_ | 4670-4690 | UAACUAUUGAUA | 925 | NM_016841.4_ | 4668-4690 |
| 526394.1 | UCAAUAGUUA | | 4670- | | AAGUGAGUCAG | | 4668-4690_ | |
| | | | 4690_C21U_s | | | | G1A_as | |
| AD- | AAAGGACGCAU | 833 | NM_ | 3420-3440 | UUCAAGAUACAU | 926 | NM_ | 3418-3440 |
| 395452.1 | GUAUCUUGAA | | 001038609.2_ | | GCGUCCUUUUU | | 001038609.2_ | |
| | | | 3420-3440_s | | | | 3418-3440_as | |
| AD- | UCUUGAAAUGC | 834 | NM_016841.4_ | 3328-3348 | UUCUUUACAAGC | 927 | NM_016841.4_ | 3326-3348 |
| 525343.1 | UUGUAAAGAA | | 3328- | | AUUUCAAGAUA | | 3326-3348_ | |
| | | | 3348_G21U_s | | | | C1A_as | |
| AD- | CAGGCAAUUCC | 835 | NM_016841.4_ | 1665-1685 | UGAAUCAAAAGG | 928 | NM_016841.4_ | 1663-1685 |
| 524274.1 | UUUUGAUUCA | | 1665-1685_s | | AAUUGCCUGAG | | 1663- | |
| | | | | | | | 1685_as | |
| AD- | GAGGGACAUGA | 836 | NM_016841.4_ | 5409-5429 | UAAGAUGAUUUC | 929 | NM_016841.4_ | 5407-5429 |
| 526956.1 | AAUCAUCUUA | | 5409- | | AUGUCCCUCCC | | 5407-5429_ | |
| | | | 5429_A21U_s | | | | U1A_as | |
| AD- | UCUGUCUGUGA | 837 | NM_016841.4_ | 5439-5459 | UUAUAGACAUUC | 930 | NM_016841.4_ | 5437-5459 |
| 526986.1 | AUGUCUAUAA | | 5439-5459_s | | ACAGACAGAAA | | 5437- | |
| | | | | | | | 5459_as | |
| AD- | GCACGCUGGCU | 838 | NM_016841.4_ | 4527-4547 | UAAGAUCACAAG | 931 | NM_016841.4_ | 4525-4547 |
| 526296.1 | UGUGAUCUUA | | 4527- | | CCAGCGUGCCU | | 4525-4547_ | |
| | | | 4547_A21U_s | | | | U1A_as | |
| AD- | UGUCUGUGAAU | 839 | NM_016841.4_ | 5441-5461 | UUAUAUAGACAU | 932 | NM_016841.4_ | 5439-5461 |
| 526988.1 | GUCUAUAUAA | | 5441- | | UCACAGACAGA | | 5439-5461_ | |
| | | | 5461_G21U_s | | | | C1A_as | |
| AD- | AGGGACAUGAA | 840 | NM_016841.4_ | 5410-5430 | UUAAGAUGAUUU | 933 | NM_016841.4_ | 5408-5430 |
| 526957.1 | AUCAUCUUAA | | 5410- | | CAUGUCCCUCC | | 5408-5430_ | |
| | | | 5430_G21U_s | | | | C1A_as | |
| AD- | GUGAAUGUCUA | 841 | NM_016841.4_ | 5446-5466 | UUACACUAUAUA | 934 | NM_016841.4_ | 5444-5466 |
| 526993.1 | UAUAGUGUAA | | 5446-5466_s | | GACAUUCACAG | | 5444- | |
| | | | | | | | 5466_as | |
| AD- | UGUGUGUUUUA | 842 | NM_016841.4_ | 5467-5487 | UAUCAUUUGUUA | 935 | NM_016841.4_ | 5465-5487 |
| 527013.1 | ACAAAUGAUA | | 5467-5487_s | | AAACACACAAU | | 5465- | |
| | | | | | | | 5487_as | |
| AD- | GCAAGUCCCAU | 843 | NM_016841.4_ | 5369-5389 | UGAAGAAAUCAU | 936 | NM_016841.4_ | 5367-5389 |
| 526936.1 | GAUUUCUUCA | | 5369- | | GGGACUUGCAA | | 5367-5389_ | |
| | | | 5389_G21U_s | | | | C1A_as | |
| AD- | AAGGACGCAUG | 844 | NM_ | 3421-3441 | UUUCAAGAUACA | 937 | NM_ | 3419-3441 |
| 395453.1 | UAUCUUGAAA | | 001038609.2_ | | UGCGUCCUUUU | | 001038609.2_ | |
| | | | 3421-3441_s | | | | 3419- | |
| | | | | | | | 3441_as | |
| AD- | GUCUGUGAAUG | 845 | NM_016841.4_ | 5442-5462 | UCUAUAUAGACA | 938 | NM_016841.4_ | 5440-5462 |
| 526989.1 | UCUAUAUAGA | | 5442-5462_s | | UUCACAGACAG | | 5440- | |
| | | | | | | | 5462_as | |
| AD- | CUAACCAGUUC | 846 | NM_016841.4_ | 2379-2399 | UUUACAAAGAGA | 939 | NM_016841.4_ | 2377-2399 |
| 524719.1 | UCUUUGUAAA | | 2379- | | ACUGGUUAGCC | | 2377-2399_ | |
| | | | 2399_G21U_s | | | | C1A_as | |
| AD- | GACUGUAUCCU | 847 | NM_016841.4_ | 4715-4735 | UAUAGCAAACAG | 940 | NM_016841.4_ | 4713-4735 |
| 526423.1 | GUUUGCUAUA | | 4715-4735_s | | GAUACAGUCUC | | 4713- | |
| | | | | | | | 4735_as | |
| AD- | UAUUGUGUGUU | 848 | NM_016841.4_ | 5464-5484 | UAUUUGUUAAAA | 941 | NM_016841.4_ | 5462-5484 |
| 527010.1 | UUAACAAAUA | | 5464- | | CACACAAUACA | | 5462-5484_ | |
| | | | 5484_G21U_s | | | | C1A_as | |
| AD- | GUUGGAUUUGU | 849 | NM_016841.4_ | 3244-3264 | UCAUAAACAGAC | 942 | NM_016841.4_ | 3242-3264 |
| 525305.1 | CUGUUUAUGA | | 3244- | | AAAUCCAACUA | | 3242-3264_ | |
| | | | 3264_C21U_s | | | | G1A_as | |
| AD- | CUGUCUGUGAA | 850 | NM_016841.4_ | 5440-5460 | UAUAUAGACAUU | 943 | NM_016841.4_ | 5438-5460 |
| 526987.1 | UGUCUAUAUA | | 5440- | | CACAGACAGAA | | 5438-5460_ | |
| | | | 5460_A21U_s | | | | U1A_as | |
| AD- | GCAGCAACAAA | 851 | NM_016841.4_ | 1812-1832 | UUUCAAAUCCUU | 944 | NM_016841.4_ | 1810-1832 |
| 524331.1 | GGAUUUGAAA | | 1812- | | UGUUGCUGCCA | | 1810-1832_ | |
| | | | 1832_A21U_s | | | | U1A_as | |
| AD- | GAGCAGCUGAA | 852 | NM_016841.4_ | 3181-3201 | UAUGUAUAUGUU | 945 | NM_016841.4_ | 3179-3201 |
| 525266.1 | CAUAUACAUA | | 3181- | | CAGCUGCUCCA | | 3179-3201_ | |
| | | | 3201_A21U_s | | | | U1A_as | |
| AD- | AUCUUGAAAUG | 853 | NM_016841.4_ | 3327-3347 | UCUUUACAAGCA | 946 | NM_016841.4_ | 3325-3347 |
| 525342.1 | CUUGUAAAGA | | 3327- | | UUUCAAGAUAC | | 3325-3347_ | |
| | | | 3347_A21U_s | | | | U1A_as | |
| AD- | GAAUGUCUAUA | 854 | NM_016841.4_ | 5448-5468 | UAAUACACUAUA | 947 | NM_016841.4_ | 5446-5468 |
| 526995.1 | UAGUGUAUUA | | 5448- | | UAGACAUUCAC | | 5446-5468_ | |
| | | | 5468_G21U_s | | | | C1A_as | |
| AD- | ACGCUGGCUUG | 855 | NM_016841.4_ | 4529-4549 | UUUAAGAUCACA | 948 | NM_016841.4_ | 4527-4549 |
| 526298.1 | UGAUCUUAAA | | 4529- | | AGCCAGCGUGC | | 4527-4549_ | |
| | | | 4549_A21U_s | | | | U1A_as | |
| AD- | GCUAACCAGUU | 856 | NM_016841.4_ | 2378-2398 | UUACAAAGAGAA | 949 | NM_016841.4_ | 2376-2398 |
| 524718.1 | CUCUUUGUAA | | 2378- | | CUGGUUAGCCC | | 2376-2398_ | |
| | | | 2398_A21U_s | | | | U1A_as | |
| AD- | CUGACUCACUU | 857 | NM_016841.4_ | 4668-4688 | UCUAUUGAUAAA | 950 | NM_016841.4_ | 4666-4688 |
| 526392.1 | UAUCAAUAGA | | 4668-4688_s | | GUGAGUCAGCA | | 4666- | |
| | | | | | | | 4688_as | |
| AD- | UUCUGUCUGUG | 858 | NM_016841.4_ | 5438-5458 | UAUAGACAUUCA | 951 | NM_016841.4_ | 5436-5458 |
| 526985.1 | AAUGUCUAUA | | 5438- | | CAGACAGAAAG | | 5436-5458_ | |
| | | | 5458_A21U_s | | | | U1A_as | |
| AD- | AUUGUGUGUUU | 859 | NM_016841.4_ | 5465-5485 | UCAUUUGUUAAA | 952 | NM_016841.4_ | 5463-5485 |
| 527011.1 | UAACAAAUGA | | 5465- | | ACACACAAUAC | | 5463-5485_ | |
| | | | 5485_A21U_s | | | | U1A_as | |
| AD- | UAUCUUGAAAU | 860 | NM_016841.4_ | 3326-3346 | UUUUACAAGCAU | 953 | NM_016841.4_ | 3324-3346 |
| 525341.1 | GCUUGUAAAA | | 3326- | | UUCAAGAUACA | | 3324-3346_ | |
| | | | 3346_G21U_s | | | | C1A_as | |
| AD- | GGAGCAGCUGA | 861 | NM_016841.4_ | 3180-3200 | UUGUAUAUGUUC | 954 | NM_016841.4_ | 3178-3200 |
| 525265.1 | ACAUAUACAA | | 3180-3200_s | | AGCUGCUCCAG | | 3178- | |
| | | | | | | | 3200_as | |
| AD- | AUAGUGUAUUG | 862 | NM_016841.4_ | 5458-5478 | UUAAAACACACA | 955 | NM_016841.4_ | 5456-5478 |
| 527004.1 | UGUGUUUUAA | | 5458- | | AUACACUAUAU | | 5456-5478_ | |
| | | | 5478_A21U_s | | | | U1A_as | |
| AD- | GCAUGUAUCUU | 863 | NM_016841.4_ | 3321-3341 | UAAGCAUUUCAA | 956 | NM_016841.4_ | 3319-3341 |
| 525336.1 | GAAAUGCUUA | | 3321- | | GAUACAUGCGU | | 3319-3341_ | |
| | | | 3341_G21U_s | | | | C1A_as | |
| AD- | CUUGUAAAGAG | 864 | NM_016841.4_ | 3338-3358 | UGUUAGAAACCU | 957 | NM_016841.4_ | 3336-3358 |
| 525353.1 | GUUUCUAACA | | 3338- | | CUUUACAAGCA | | 3336-3358_ | |
| | | | 3358_C21U_s | | | | G1A_as | |
| AD- | UGAACAUAUAC | 865 | NM_016841.4_ | 3188-3208 | UAACAUCUAUGU | 958 | NM_016841.4_ | 3186-3208 |
| 525273.1 | AUAGAUGUUA | | 3188- | | AUAUGUUCAGC | | 3186-3208_ | |
| | | | 3208_G21U_s | | | | C1A_as | |
| AD- | UCCACAGAAAC | 866 | NM_016841.4_ | 2294-2314 | UUAAAACAGGGU | 959 | NM_016841.4_ | 2292-2314 |
| 524638.1 | CCUGUUUUAA | | 2294-2314_s | | UUCUGUGGAGC | | 2292- | |
| | | | | | | | 2314_as | |
| AD- | GGCUAGAUAGG | 867 | NM_016841.4_ | 4628-4648 | UACAGUAUAUCC | 960 | NM_016841.4_ | 4626-4648 |
| 526350.1 | AUAUACUGUA | | 4628- | | UAUCUAGCCCA | | 4626-4648_ | |
| | | | 4648_A21U_s | | | | U1A_as | |
| AD- | CAUGAAAUCAU | 868 | NM_016841.4_ | 5415-5435 | UUAAGCUAAGAU | 961 | NM_016841.4_ | 5413-5435 |
| 526962.1 | CUUAGCUUAA | | 5415- | | GAUUUCAUGUC | | 5413-5435_ | |
| | | | 5435_G21U_s | | | | C1A_as | |
| AD- | UAGUGUAUUGU | 869 | NM_016841.4_ | 5459-5479 | UUUAAAACACAC | 962 | NM_016841.4_ | 5457-5479 |
| 527005.1 | GUGUUUUAAA | | 5459- | | AAUACACUAUA | | 5457-5479_ | |
| | | | 5479_C21U_s | | | | G1A_as | |
| AD- | CAGCUGAACAU | 870 | NM_016841.4_ | 3184-3204 | UUCUAUGUAUAU | 963 | NM_016841.4_ | 3182-3204 |
| 525269.1 | AUACAUAGAA | | 3184-3204_s | | GUUCAGCUGCU | | 3182- | |
| | | | | | | | 3204_as | |
| AD- | AGGGCUAACCA | 871 | NM_016841.4_ | 2375-2395 | UAAAGAGAACUG | 964 | NM_016841.4_ | 2373-2395 |
| 524715.1 | GUUCUCUUUA | | 2375- | | GUUAGCCCUAA | | 2373-2395_ | |
| | | | 2395_G21U_s | | | | C1A_as | |
| AD- | AGGACGCAUGU | 872 | NM_ | 3422-3442 | UUUUCAAGAUAC | 965 | NM_ | 3420-3442 |
| 395454.1 | AUCUUGAAAA | | 001038609.2_ | | AUGCGUCCUUU | | 001038609.2_ | |
| | | | 3422-3442_s | | | | 3420-3442_as | |
| AD- | UGGAUUUGUCU | 873 | NM_016841.4_ | 3246-3266 | UAGCAUAAACAG | 966 | NM_016841.4_ | 3244-3266 |
| 525307.1 | GUUUAUGCUA | | 3246-3266_s | | ACAAAUCCAAC | | 3244- | |
| | | | | | | | 3266_as | |
| AD- | GCUUGUAAAGA | 874 | NM_016841.4_ | 3337-3357 | UUUAGAAACCUC | 967 | NM_016841.4_ | 3335-3357 |
| 525352.1 | GGUUUCUAAA | | 3337- | | UUUACAAGCAU | | 3335-3357_ | |
| | | | 3357_C21U_s | | | | G1A_as | |
| AD- | ACAGAAACCCU | 875 | NM_016841.4_ | 2297-2317 | UCAAUAAAACAG | 968 | NM_016841.4_ | 2295-2317 |
| 524641.1 | GUUUUAUUGA | | 2297- | | GGUUUCUGUGG | | 2295-2317_ | |
| | | | 2317_A21U_s | | | | U1A_as | |
| AD- | CACGCUGGCUU | 876 | NM_016841.4_ | 4528-4548 | UUAAGAUCACAA | 969 | NM_016841.4_ | 4526-4548 |
| 526297.1 | GUGAUCUUAA | | 4528- | | GCCAGCGUGCC | | 4526-4548_ | |
| | | | 4548_A21U_s | | | | U1A_as | |
| AD- | GCAGCUGAACA | 877 | NM_016841.4_ | 3183-3203 | UCUAUGUAUAUG | 970 | NM_016841.4_ | 3181-3203 |
| 525268.1 | UAUACAUAGA | | 3183- | | UUCAGCUGCUC | | 3181-3203_ | |
| | | | 3203_A21U_s | | | | U1A_as | |
| AD- | AUGUCUAUAUA | 878 | NM_016841.4_ | 5450-5470 | UACAAUACACUA | 971 | NM_016841.4_ | 5448-5470 |
| 526997.1 | GUGUAUUGUA | | 5450- | | UAUAGACAUUC | | 5448-5470_ | |
| | | | 5470_G21U_s | | | | C1A_as | |
| AD- | CUGUGAAUGUC | 879 | NM_016841.4_ | 5444-5464 | UCACUAUAUAGA | 972 | NM_016841.4_ | 5442-5464 |
| 526991.1 | UAUAUAGUGA | | 5444-5464_s | | CAUUCACAGAC | | 5442- | |
| | | | | | | | 5464_as | |
| AD- | UUGUGUGUUUU | 880 | NM_016841.4_ | 5466-5486 | UUCAUUUGUUAA | 973 | NM_016841.4_ | 5464-5486 |
| 527012.1 | AACAAAUGAA | | 5466-5486_s | | AACACACAAUA | | 5464- | |
| | | | | | | | 5486_as | |
| AD- | UAACCAGUUCU | 881 | NM_016841.4_ | 2380-2400 | UCUUACAAAGAG | 974 | NM_016841.4_ | 2378-2400 |
| 524720.1 | CUUUGUAAGA | | 2380- | | AACUGGUUAGC | | 2378-2400_ | |
| | | | 2400_G21U_s | | | | C1A_as | |
| AD- | UAGUUGGAUUU | 882 | NM_016841.4_ | 3242-3262 | UUAAACAGACAA | 975 | NM_016841.4_ | 3240-3262 |
| 525303.1 | GUCUGUUUAA | | 3242-3262_s | | AUCCAACUACA | | 3240- | |
| | | | | | | | 3262_as | |
| AD- | UGAAAAGGCAC | 883 | NM_016841.4_ | 4520-4540 | UCAAGCCAGCGU | 976 | NM_016841.4_ | 4518-4540 |
| 526289.1 | GCUGGCUUGA | | 4520-4540_s | | GCCUUUUCAAU | | 4518- | |
| | | | | | | | 4540_as | |
| AD- | UGUGAAUGUCU | 884 | NM_016841.4_ | 5445-5465 | UACACUAUAUAG | 977 | NM_016841.4_ | 5443-5465 |
| 526992.1 | AUAUAGUGUA | | 5445- | | ACAUUCACAGA | | 5443-5465_ | |
| | | | 5465_A21U_s | | | | U1A_as | |
| AD- | GACGCAUGUAU | 885 | NM_016841.4_ | 3318-3338 | UCAUUUCAAGAU | 978 | NM_016841.4_ | 3316-3338 |
| 525333.1 | CUUGAAAUGA | | 3318- | | ACAUGCGUCCU | | 3316-3338_ | |
| | | | 3338_C21U_s | | | | G1A_as | |
| AD- | CAACAAAGGAU | 886 | NM_016841.4_ | 1816-1836 | UAAGUUUCAAAU | 979 | NM_016841.4_ | 1814-1836 |
| 524335.1 | UUGAAACUUA | | 1816- | | CCUUUGUUGCU | | 1814-1836_ | |
| | | | 1836_G21U_s | | | | C1A_as | |
| AD- | UCUGUGAAUGU | 887 | NM_016841.4_ | 5443-5463 | UACUAUAUAGAC | 980 | NM_016841.4_ | 5441-5463 |
| 526990.1 | CUAUAUAGUA | | 5443- | | AUUCACAGACA | | 5441-5463_ | |
| | | | 5463_G21U_s | | | | C1A_as | |
| AD- | AGUGUAUUGUG | 888 | NM_016841.4_ | 5460-5480 | UGUUAAAACACA | 981 | NM_016841.4_ | 5458-5480 |
| 527006.1 | UGUUUUAACA | | 5460- | | CAAUACACUAU | | 5458-5480_ | |
| | | | 5480_A21U_s | | | | U1A_as | |
| AD- | GAUUUCAACCA | 889 | NM_016841.4_ | 4842-4862 | UUAGCAAAUGUG | 982 | NM_016841.4_ | 4840-4862 |
| 526505.1 | CAUUUGCUAA | | 4842- | | GUUGAAAUCAU | | 4840-4862_ | |
| | | | 4862_G21U_s | | | | C1A_as | |
| AD- | UUCACCAGAGU | 890 | NM_ | 3338-3358 | UAUCAUAGUCAC | 983 | NM_016841.4_ | 3336-3358 |
| 525309.1 | GACUAUGAUA | | 001038609.2_ | | UCUGGUGAAUC | | 3268-3290_ | |
| | | | 3338-3358_s | | | | U1A_as | |
| AD- | GUGGCAGCAAC | 891 | NM_016841.4_ | 1809-1829 | UAAAUCCUUUGU | 984 | NM_016841.4_ | 1807-1829 |
| 524328.1 | AAAGGAUUUA | | 1809- | | UGCUGCCACUG | | 1807-1829_ | |
| | | | 1829_G21U_s | | | | C1A_as | |
| AD- | GGACGCAUGUA | 892 | NM_ | 3423-3443 | UAUUUCAAGAUA | 985 | NM_ | 3421-3443 |
| 395455.1 | UCUUGAAAUA | | 001038609.2_ | | CAUGCGUCCUU | | 001038609.2_ | |
| | | | 3423-3443_s | | | | 3421-3443_as | |
| AD- | UAUCCUGUUUG | 893 | NM_016841.4_ | 4720-4740 | UAAGCAAUAGCA | 986 | NM_016841.4_ | 4718-4740 |
| 526428.1 | CUAUUGCUUA | | 4720- | | AACAGGAUACA | | 4718-4740_ | |
| | | | 4740_G21U_s | | | | C1A_as | |
| AD- | UUCUCUUCAGC | 894 | NM_016841.4_ | 5259-5279 | UCUUUUCAAAGC | 987 | NM_016841.4_ | 5257-5279 |
| 526847.1 | UUUGAAAAGA | | 5259- | | UGAAGAGAAAU | | 5257-5279_ | |
| | | | 5279_G21U_s | | | | C1A_as | |
| AD- | UCUGGUUUGGG | 895 | NM_016841.4_ | 4084-4104 | UUUAACUGUACC | 988 | NM_016841.4_ | 4082-4104 |
| 525957.1 | UACAGUUAAA | | 4084- | | CAAACCAGAAG | | 4082-4104_ | |
| | | | 4104_A21U_s | | | | U1A_as | |
| AD- | CAGCAACAAAG | 896 | NM_016841.4_ | 1813-1833 | UUUUCAAAUCCU | 989 | NM_016841.4_ | 1811-1833 |
| 524332.1 | GAUUUGAAAA | | 1813- | | UUGUUGCUGCC | | 1811-1833_ | |
| | | | 1833_C21U_s | | | | G1A_as | |
| AD- | AAAAGGCACGC | 897 | NM_016841.4_ | 4522-4542 | UCACAAGCCAGC | 990 | NM_016841.4_ | 4520-4542 |
| 526291.1 | UGGCUUGUGA | | 4522- | | GUGCCUUUUCA | | 4520-4542_ | |
| | | | 4542_A21U_s | | | | U1A_as | |
| AD- | UGCCUCGUAAC | 898 | NM_016841.4_ | 4822-4842 | UAUGAAAAGGGU | 991 | NM_016841.4_ | 4820-4842 |
| 526485.1 | CCUUUUCAUA | | 4822- | | UACGAGGCAGU | | 4820-4842_ | |
| | | | 4842_G21U_s | | | | C1A_as | |
| AD- | AAAGGCACGCU | 899 | NM_016841.4_ | 4523-4543 | UUCACAAGCCAG | 992 | NM_016841.4_ | 4521-4543 |
| 526292.1 | GGCUUGUGAA | | 4523-4543_s | | CGUGCCUUUUC | | 4521- | |
| | | | | | | | 4543_as | |
| AD- | CAGAAACCCUG | 900 | NM_016841.4_ | 2298-2318 | UUCAAUAAAACA | 993 | NM_016841.4_ | 2296-2318 |
| 524642.1 | UUUUAUUGAA | | 2298- | | GGGUUUCUGUG | | 2296-2318_ | |
| | | | 2318_G21U_s | | | | C1A_as | |
| AD- | GAAAAGGCACG | 901 | NM_016841.4_ | 4521-4541 | UACAAGCCAGCG | 994 | NM_016841.4_ | 4519-4541 |
| 526290.1 | CUGGCUUGUA | | 4521- | | UGCCUUUUCAA | | 4519-4541_ | |
| | | | 4541_G21U_s | | | | C1A_as | |
| AD- | UGGUUUGGGUA | 902 | NM_016841.4_ | 4086-4106 | UCUUUAACUGUA | 995 | NM_016841.4_ | 4084-4106 |
| 525959.1 | CAGUUAAAGA | | 4086- | | CCCAAACCAGA | | 4084-4106_ | |
| | | | 4106_G21U_s | | | | C1A_as | |
| AD- | AAGGCACGCUG | 903 | NM_016841.4_ | 4524-4544 | UAUCACAAGCCA | 996 | NM_016841.4_ | 4522-4544 |
| 526293.1 | GCUUGUGAUA | | 4524- | | GCGUGCCUUUU | | 4522-4544_ | |
| | | | 4544_C21U_s | | | | G1A_as | |
| AD- | CAUACUGAGGG | 904 | NM_016841.4_ | 2668-2688 | UUUAAUUUCACC | 997 | NM_016841.4_ | 2666-2688 |
| 524899.1 | UGAAAUUAAA | | 2668- | | CUCAGUAUGGA | | 2666-2688_ | |
| | | | 2688_G21U_s | | | | C1A_as | |
| AD- | GCUGACUCACU | 905 | NM_016841.4_ | 4667-4687 | UUAUUGAUAAAG | 998 | NM_016841.4_ | 4665-4687 |
| 526391.1 | UUAUCAAUAA | | 4667- | | UGAGUCAGCAG | | 4665-4687_ | |
| | | | 4687_G21U_s | | | | C1A_as | |
| AD- | UUCUGGUUUGG | 906 | NM_016841.4_ | 4083-4103 | UUAACUGUACCC | 999 | NM_016841.4_ | 4081-4103 |
| 525956.1 | GUACAGUUAA | | 4083- | | AAACCAGAAGU | | 4081-4103_ | |
| | | | 4103_A21U_s | | | | U1A_as | |
| AD- | CUGGUUUGGGU | 907 | NM_016841.4_ | 4085-4105 | UUUUAACUGUAC | 1000 | NM_016841.4_ | 4083-4105 |
| 525958.1 | ACAGUUAAAA | | 4085- | | CCAAACCAGAA | | 4083-4105_ | |
| | | | 4105_G21U_s | | | | C1A_as | |
| AD- | GCUAGAUAGGA | 908 | NM_016841.4_ | 4629-4649 | UUACAGUAUAUC | 1001 | NM_016841.4_ | 4627-4649 |
| 526351.1 | UAUACUGUAA | | 4629-4649_s | | CUAUCUAGCCC | | 4627- | |
| | | | | | | | 4649_as | |
| AD- | CUCAUUACUGC | 909 | NM_016841.4_ | 4329-4349 | UAAACUGUUGGC | 1002 | NM_016841.4_ | 4327-4349 |
| 526138.1 | CAACAGUUUA | | 4329- | | AGUAAUGAGGG | | 4327-4349_ | |
| | | | 4349_C21U_s | | | | G1A_as | |
| AD- | CCAUACUGAGG | 910 | NM_016841.4_ | 2667-2687 | UUAAUUUCACCC | 1003 | NM_016841.4_ | 2665-2687 |
| 524898.1 | GUGAAAUUAA | | 2667- | | UCAGUAUGGAG | | 2665-2687_ | |
| | | | 2687_A21U_s | | | | U1A_as | |
| AD- | CAGCCUAAGAU | 911 | NM_016841.4_ | 4475-4495 | UUAAACCAUGAU | 1004 | NM_016841.4_ | 4473-4495 |
| 526244.1 | CAUGGUUUAA | | 4475- | | CUUAGGCUGGC | | 4473-4495_ | |
| | | | 4495_G21U_s | | | | C1A_as | |
| AD- | AAGAGGUUUCU | 912 | NM_016841.4_ | 3344-3364 | UGGGUGGGUUAG | 1005 | NM_016841.4_ | 3342-3364 |
| 525359.1 | AACCCACCCA | | 3344-3364_s | | AAACCUCUUUA | | 3342- | |
| | | | | | | | 3364_as | |
| AD- | UGACUCACUUU | 913 | NM_016841.4_ | 4669-4689 | UACUAUUGAUAA | 1006 | NM_016841.4_ | 4667-4689 |
| 526393.1 | AUCAAUAGUA | | 4669-4689_s | | AGUGAGUCAGC | | 4667- | |
| | | | | | | | 4689_as | |
| AD- | UGUAAAGAGGU | 914 | NM_016841.4_ | 3340-3360 | UGGGUUAGAAAC | 1007 | NM_016841.4_ | 3338-3360 |
| 525355.1 | UUCUAACCCA | | 3340- | | CUCUUUACAAG | | 3338-3360_ | |
| | | | 3360_A21U_s | | | | U1A_as | |
| AD- | UUGAAAAGGCA | 915 | NM_016841.4_ | 4519-4539 | UAAGCCAGCGUG | 1008 | NM_016841.4_ | 4517-4539 |
| 526288.1 | CGCUGGCUUA | | 4519- | | CCUUUUCAAUU | | 4517-4539_ | |
| | | | 4539_G21U_s | | | | C1A_as | |
| AD- | UCCAUACUGAG | 916 | NM_016841.4_ | 2666-2686 | UAAUUUCACCCU | 1009 | NM_016841.4_ | 2664-2686 |
| 524897.1 | GGUGAAAUUA | | 2666- | | CAGUAUGGAGU | | 2664-2686_ | |
| | | | 2686_A21U_s | | | | U1A_as | |
| AD- | GAUCACCUGCG | 917 | NM_016841.4_ | 5208-5228 | UGAUGGGACACG | 1010 | NM_016841.4_ | 5206-5228 |
| 526796.1 | UGUCCCAUCA | | 5208-5228_s | | CAGGUGAUCAC | | 5206- | |
| | | | | | | | 5228_as | |
| AD- | GGCACGCUGGC | 918 | NM_016841.4_ | 4526-4546 | UAGAUCACAAGC | 1011 | NM_016841.4_ | 4524-4546 |
| 526295.1 | UUGUGAUCUA | | 4526-4546_s | | CAGCGUGCCUU | | 4524- | |
| | | | | | | | 4546_as | |
| AD- | AGGCACGCUGG | 919 | NM_016841.4_ | 4525-4545 | UGAUCACAAGCC | 1012 | NM_016841.4_ | 4523-4545 |
| 526294.1 | CUUGUGAUCA | | 4525-4545_s | | AGCGUGCCUUU | | 4523- | |
| | | | | | | | 4545_as | |
| AD- | GUAAAGAGGUU | 920 | NM_016841.4_ | 3341-3361 | UUGGGUUAGAAA | 1013 | NM_016841.4_ | 3339-3361 |
| 525356.1 | UCUAACCCAA | | 3341- | | CCUCUUUACAA | | 3339-3361_ | |
| | | | 3361_C21U_s | | | | G1A_as | |

TABLE 6
Modified Sense and Antisense Strand Sequences of MAPT dsRNA Agents-Screen 1

| | | SEQ | | SEQ | mRNA Target | SEQ |
|---|---|---|---|---|---|---|
| | Sense Sequence | ID | Antisense Sequence | ID | Sequence | ID |
| Duplex ID | 5′ to 3′ | NO: | 5′ to 3′ | NO: | 5′ to 3′ | NO: |
| AD-523799.1 | asusagucUfaCfAfAf | 163 | VPusUfscaaCfuGfGfuuu | 238 | AAAUAGUCUACAAACC | 313 |
| | accaguugaaL96 | | gUfaGfacuaususu | | AGUUGAC | |
| AD-523802.1 | gsuscuacAfaAfCfCf | 164 | VPusAfsgguCfaAfCfug | 239 | UAGUCUACAAACCAGU | 314 |
| | aguugaccuaL96 | | guUfuGfuagacsusa | | UGACCUG | |
| AD-523795.1 | gscsaaauAfgUfCfUf | 165 | VPusCfsuggUfuUfGfua | 240 | GUGCAAAUAGUCUACA | 315 |
| | acaaaccagaL96 | | gaCfuAfuuugcsasc | | AACCAGU | |
| AD-523810.1 | ascscaguUfgAfCfCf | 166 | VPusCfscuuGfcUfCfagg | 241 | AAACCAGUUGACCUGA | 316 |
| | ugagcaaggaL96 | | uCfaAfcuggususu | | GCAAGGU | |
| AD-523809.1 | asasccagUfuGfAfCf | 167 | VPusCfsuugCfuCfAfgg | 242 | CAAACCAGUUGACCUG | 317 |
| | cugagcaagaL96 | | ucAfaCfugguususg | | AGCAAGG | |
| AD-1019331.1 | usgscaaaUfaGfUfCf | 168 | VPusUfsgguUfuGfUfag | 243 | AGGUGCAAAUAGUCU | 318 |
| | uacaaaccaaL96 | | acUfaUfuugcascsa | | ACAAACCA | |
| AD-523801.1 | asgsucuaCfaAfAfCf | 169 | VPusGfsgucAfaCfUfgg | 244 | AUAGUCUACAAACCAG | 319 |
| | caguugaccaL96 | | uuUfgUfagacusasu | | UUGACCU | |
| AD-523823.1 | asgscaagGfuGfAfCf | 170 | VPusCfsacuUfgGfAfgg | 245 | UGAGCAAGGUGACCUC | 320 |
| | cuccaagugaL96 | | ucAfcCfuugcuscsa | | CAAGUGU | |
| AD-523798.1 | asasuaguCfuAfCfAf | 171 | VPusCfsaacUfgGfUfuug | 246 | CAAAUAGUCUACAAAC | 321 |
| | aaccaguugaL96 | | uAfgAfcuauususg | | CAGUUGA | |
| AD-523816.1 | usgsaccuGfaGfCfAf | 172 | VPusAfsgguCfaCfCfuug | 247 | GUUGACCUGAGCAAGG | 322 |
| | aggugaccuaL96 | | cUfcAfggucasasc | | UGACCUC | |
| AD-523824.1 | gscsaaggUfgAfCfCf | 173 | VPusAfscacUfuGfGfagg | 248 | GAGCAAGGUGACCUCC | 323 |
| | uccaaguguaL96 | | uCfaCfcuugcsusc | | AAGUGUG | |
| AD-523800.1 | usasgucuAfcAfAfA | 174 | VPusGfsucaAfcUfGfgu | 249 | AAUAGUCUACAAACCA | 324 |
| | fccaguugacaL96 | | uuGfuAfgacuasusu | | GUUGACC | |
| AD-523796.1 | csasaauaGfuCfUfAf | 175 | VPusAfscugGfuUfUfgu | 250 | UGCAAAUAGUCUACAA | 325 |
| | caaaccaguaL96 | | agAfcUfauuugscsa | | ACCAGUU | |
| AD-523803.1 | uscsuacaAfaCfCfAf | 176 | VPusCfsaggUfcAfAfcug | 251 | AGUCUACAAACCAGUU | 326 |
| | guugaccugaL96 | | gUfuUfguagascsu | | GACCUGA | |
| AD-523817.1 | gsasccugAfgCfAfA | 177 | VPusGfsaggUfcAfCfcuu | 252 | UUGACCUGAGCAAGGU | 327 |
| | fggugaccucaL96 | | gCfuCfaggucsasa | | GACCUCC | |
| AD-523825.1 | csasagguGfaCfCfUf | 178 | VPusCfsacaCfuUfGfgag | 253 | AGCAAGGUGACCUCCA | 328 |
| | ccaagugugaL96 | | gUfcAfccuugscsu | | AGUGUGG | |
| AD-523811.1 | cscsaguuGfaCfCfUf | 179 | VPusAfsccuUfgCfUfcag | 254 | AACCAGUUGACCUGAG | 329 |
| | gagcaagguaL96 | | gUfcAfacuggsusu | | CAAGGUG | |
| AD-523854.1 | gsgscaacAfuCfCfAf | 180 | VPusGfsguuUfaUfGfau | 255 | UAGGCAACAUCCAUCA | 330 |
| | ucauaaaccaL96 | | ggAfuGfuugccsusa | | UAAACCA | |
| AD-523797.1 | asasauagUfcUfAfCf | 181 | VPusAfsacuGfgUfUfug | 256 | GCAAAUAGUCUACAAA | 331 |
| | aaaccaguuaL96 | | uaGfaCfuauuusgsc | | CCAGUUG | |
| AD-523805.1 | usascaaaCfcAfGfUf | 182 | VPusCfsucaGfgUfCfaac | 257 | UCUACAAACCAGUUGA | 332 |
| | ugaccugagaL96 | | uGfgUfuuguasgsa | | CCUGAGC | |
| AD-523814.1 | gsusugacCfuGfAfG | 183 | VPusGfsucaCfcUfUfgcu | 258 | CAGUUGACCUGAGCAA | 333 |
| | fcaaggugacaL96 | | cAfgGfucaacsusg | | GGUGACC | |
| AD-523804.1 | csusacaaAfcCfAfGf | 184 | VPusUfscagGfuCfAfacu | 259 | GUCUACAAACCAGUUG | 334 |
| | uugaccugaaL96 | | gGfuUfuguagsasc | | ACCUGAG | |
| AD-1019356.1 | gsusgugcAfaAfUfA | 185 | VPusUfsuugUfaGfAfcu | 260 | CAGUGUGCAAAUAGUC | 335 |
| | fgucuacaaaaL96 | | auUfuGfcacacsusg | | UACAAAC | |
| AD-523846.1 | gscsucauUfaGfGfCf | 186 | VPusAfsuggAfuGfUfug | 261 | UGGCUCAUUAGGCAAC | 336 |
| | aacauccauaL96 | | ccUfaAfugagcscsa | | AUCCAUC | |
| AD-523808.1 | asasaccaGfuUfGfAf | 187 | VPusUfsugcUfcAfGfgu | 262 | ACAAACCAGUUGACCU | 337 |
| | ccugagcaaaL96 | | caAfcUfgguuusgsu | | GAGCAAG | |
| AD-523835.1 | cscsaaguGfuGfGfCf | 188 | VPusGfsccuAfaUfGfagc | 263 | CUCCAAGUGUGGCUCA | 338 |
| | ucauuaggcaL96 | | cAfcAfcuuggsasg | | UUAGGCA | |
| AD-1019357.1 | usgsugcaAfaUfAfG | 189 | VPusGfsuuuGfuAfGfac | 264 | AGUGUGCAAAUAGUC | 339 |
| | fucuacaaacaL96 | | uaUfuUfgcacascsu | | UACAAACC | |
| AD-523853.1 | asgsgcaaCfaUfCfCf | 190 | VPusGfsuuuAfuGfAfug | 265 | UUAGGCAACAUCCAUC | 340 |
| | aucauaaacaL96 | | gaUfgUfugccusasa | | AUAAACC | |
| AD-523819.1 | cscsugagCfaAfGfGf | 191 | VPusUfsggaGfgUfCfacc | 266 | GACCUGAGCAAGGUGA | 341 |
| | ugaccuccaaL96 | | uUfgCfucaggsusc | | CCUCCAA | |
| AD-523830.1 | gsasccucCfaAfGfUf | 192 | VPusAfsugaGfcCfAfcac | 267 | GUGACCUCCAAGUGUG | 342 |
| | guggcucauaL96 | | uUfgGfaggucsasc | | GCUCAUU | |
| AD-523834.1 | uscscaagUfgUfGfG | 193 | VPusCfscuaAfuGfAfgcc | 268 | CCUCCAAGUGUGGCUC | 343 |
| | fcucauuaggaL96 | | aCfaCfuuggasgsg | | AUUAGGC | |
| AD-523850.1 | asusuaggCfaAfCfAf | 194 | VPusUfsaugAfuGfGfau | 269 | UCAUUAGGCAACAUCC | 344 |
| | uccaucauaaL96 | | guUfgCfcuaausgsa | | AUCAUAA | |
| AD-523820.1 | csusgagcAfaGfGfU | 195 | VPusUfsuggAfgGfUfca | 270 | ACCUGAGCAAGGUGAC | 345 |
| | fgaccuccaaaL96 | | ccUfuGfcucagsgsu | | CUCCAAG | |
| AD-523849.1 | csasuuagGfcAfAfCf | 196 | VPusAfsugaUfgGfAfug | 271 | CUCAUUAGGCAACAUC | 346 |
| | auccaucauaL96 | | uuGfcCfuaaugsasg | | CAUCAUA | |
| AD-523845.1 | gsgscucaUfuAfGfG | 197 | VPusUfsggaUfgUfUfgc | 272 | GUGGCUCAUUAGGCAA | 347 |
| | fcaacauccaaL96 | | cuAfaUfgagccsasc | | CAUCCAU | |
| AD-393758.3 | asgsugugCfaAfAfU | 198 | VPusUfsuguAfgAfCfua | 273 | GCAGUGUGCAAAUAG | 348 |
| | fagucuacaaaL96 | | uuUfgCfacacusgsc | | UCUACAAG | |
| AD-523848.1 | uscsauuaGfgCfAfA | 199 | VPusUfsgauGfgAfUfgu | 274 | GCUCAUUAGGCAACAU | 349 |
| | fcauccaucaaL96 | | ugCfcUfaaugasgsc | | CCAUCAU | |
| AD-523840.1 | asgsugugGfcUfCfA | 200 | VPusGfsuugCfcUfAfau | 275 | CAAGUGUGGCUCAUUA | 350 |
| | fuuaggcaacaL96 | | gaGfcCfacacususg | | GGCAACA | |
| AD-523828.1 | gsgsugacCfuCfCfAf | 201 | VPusAfsgccAfcAfCfuug | 276 | AAGGUGACCUCCAAGU | 351 |
| | aguguggcuaL96 | | gAfgGfucaccsusu | | GUGGCUC | |
| AD-523822.1 | gsasgcaaGfgUfGfA | 202 | VPusAfscuuGfgAfGfgu | 277 | CUGAGCAAGGUGACCU | 352 |
| | fccuccaaguaL96 | | caCfcUfugcucsasg | | CCAAGUG | |
| AD-523806.1 | ascsaaacCfaGfUfUf | 203 | VPusGfscucAfgGfUfcaa | 278 | CUACAAACCAGUUGAC | 353 |
| | gaccugagcaL96 | | cUfgGfuuugusasg | | CUGAGCA | |
| AD-523831.1 | ascscuccAfaGfUfGf | 204 | VPusAfsaugAfgCfCfaca | 279 | UGACCUCCAAGUGUGG | 354 |
| | uggcucauuaL96 | | cUfuGfgagguscsa | | CUCAUUA | |
| AD-393757.1 | csasguguGfcAfAfA | 205 | VPusUfsguaGfaCfUfauu | 280 | GGCAGUGUGCAAAUA | 355 |
| | fuagucuacaaL96 | | uGfcAfcacugscsc | | GUCUACAA | |
| AD-523839.1 | asasguguGfgCfUfC | 206 | VPusUfsugcCfuAfAfug | 281 | CCAAGUGUGGCUCAUU | 356 |
| | fauuaggcaaaL96 | | agCfcAfcacuusgsg | | AGGCAAC | |
| AD-523815.1 | ususgaccUfgAfGfC | 207 | VPusGfsgucAfcCfUfugc | 282 | AGUUGACCUGAGCAAG | 357 |
| | faaggugaccaL96 | | uCfaGfgucaascsu | | GUGACCU | |
| AD-523856.1 | csasacauCfcAfUfCf | 208 | VPusCfsuggUfuUfAfug | 283 | GGCAACAUCCAUCAUA | 358 |
| | auaaaccagaL96 | | auGfgAfuguugscsc | | AACCAGG | |
| AD-1019330.1 | gsusgcaaAfuAfGfU | 209 | VPusGfsguuUfgUfAfga | 284 | AGGUGCAAAUAGUCU | 359 |
| | fcuacaaaccaL96 | | cuAfuUfugcacsasc | | ACAAACCA | |
| AD-523829.1 | usgsaccuCfcAfAfGf | 210 | VPusUfsgagCfcAfCfacu | 285 | GGUGACCUCCAAGUGU | 360 |
| | uguggcucaaL96 | | uGfgAfggucascsc | | GGCUCAU | |
| AD-523855.1 | gscsaacaUfcCfAfUf | 211 | VPusUfsgguUfuAfUfga | 286 | AGGCAACAUCCAUCAU | 361 |
| | cauaaaccaaL96 | | ugGfaUfguugcscsu | | AAACCAG | |
| AD-523836.1 | csasagugUfgGfCfU | 212 | VPusUfsgccUfaAfUfgag | 287 | UCCAAGUGUGGCUCAU | 362 |
| | fcauuaggcaaL96 | | cCfaCfacuugsgsa | | UAGGCAA | |
| AD-1019329.1 | gscsagugUfgCfAfA | 213 | VPusGfsuagAfcUfAfuu | 288 | GCAGUGUGCAAAUAG | 363 |
| | fauagucuacaL96 | | ugCfaCfacugcscsg | | UCUACA | |
| AD-523843.1 | gsusggcuCfaUfUfA | 214 | VPusGfsaugUfuGfCfcua | 289 | GUGUGGCUCAUUAGGC | 364 |
| | fggcaacaucaL96 | | aUfgAfgccacsasc | | AACAUCC | |
| AD-523807.1 | csasaaccAfgUfUfGf | 215 | VPusUfsgcuCfaGfGfuca | 290 | UACAAACCAGUUGACC | 365 |
| | accugagcaaL96 | | aCfuGfguuugsusa | | UGAGCAA | |
| AD-523821.1 | usgsagcaAfgGfUfG | 216 | VPusCfsuugGfaGfGfuca | 291 | CCUGAGCAAGGUGACC | 366 |
| | faccuccaagaL96 | | cCfuUfgcucasgsg | | UCCAAGU | |
| AD-523826.1 | asasggugAfcCfUfCf | 217 | VPusCfscacAfcUfUfgga | 292 | GCAAGGUGACCUCCAA | 367 |
| | caaguguggaL96 | | gGfuCfaccuusgsc | | GUGUGGC | |
| AD-523847.1 | csuscauuAfgGfCfA | 218 | VPusGfsaugGfaUfGfuu | 293 | GGCUCAUUAGGCAACA | 368 |
| | facauccaucaL96 | | gcCfuAfaugagscsc | | UCCAUCA | |
| AD-523786.1 | gsusgaccUfcCfAfAf | 219 | VPusGfsagcCfaCfAfcuu | 294 | AGGUGACCUCCAAGUG | 369 |
| | guguggcucaL96 | | gGfaGfgucacscsu | | UGGCUCA | |
| AD-523812.1 | csasguugAfcCfUfG | 220 | VPusCfsaccUfuGfCfuca | 295 | ACCAGUUGACCUGAGC | 370 |
| | fagcaaggugaL96 | | gGfuCfaacugsgsu | | AAGGUGA | |
| AD-523827.1 | asgsgugaCfcUfCfCf | 221 | VPusGfsccaCfaCfUfugg | 296 | CAAGGUGACCUCCAAG | 371 |
| | aaguguggcaL96 | | aGfgUfcaccususg | | UGUGGCU | |
| AD-523844.1 | usgsgcucAfuUfAfG | 222 | VPusGfsgauGfuUfGfcc | 297 | UGUGGCUCAUUAGGCA | 372 |
| | fgcaacauccaL96 | | uaAfuGfagccascsa | | ACAUCCA | |
| AD-523851.1 | ususaggcAfaCfAfU | 223 | VPusUfsuauGfaUfGfga | 298 | CAUUAGGCAACAUCCA | 373 |
| | fccaucauaaaL96 | | ugUfuGfccuaasusg | | UCAUAAA | |
| AD-523818.1 | ascscugaGfcAfAfGf | 224 | VPusGfsgagGfuCfAfccu | 299 | UGACCUGAGCAAGGUG | 374 |
| | gugaccuccaL96 | | uGfcUfcagguscsa | | ACCUCCA | |
| AD-523832.1 | cscsuccaAfgUfGfUf | 225 | VPusUfsaauGfaGfCfcac | 300 | GACCUCCAAGUGUGGC | 375 |
| | ggcucauuaaL96 | | aCfuUfggaggsusc | | UCAUUAG | |
| AD-523813.1 | asgsuugaCfcUfGfA | 226 | VPusUfscacCfuUfGfcuc | 301 | CCAGUUGACCUGAGCA | 376 |
| | fgcaaggugaaL96 | | aGfgUfcaacusgsg | | AGGUGAC | |
| AD-523841.1 | gsusguggCfuCfAfU | 227 | VPusUfsguuGfcCfUfaau | 302 | AAGUGUGGCUCAUUA | 377 |
| | fuaggcaacaaL96 | | gAfgCfcacacsusu | | GGCAACAU | |
| AD-1019352.1 | asgsgcggCfaGfUfG | 228 | VPusCfsuauUfuGfCfaca | 303 | GGAGGCGGCAGUGUGC | 378 |
| | fugcaaauagaL96 | | cUfgCfcgccuscsc | | AAAUAGU | |
| AD-1019354.1 | gscsggcaGfuGfUfG | 229 | VPusGfsacuAfuUfUfgca | 304 | AGGCGGCAGUGUGCAA | 379 |
| | fcaaauagucaL96 | | cAfcUfgccgcscsu | | AUAGUCU | |
| AD-523852.1 | usasggcaAfcAfUfCf | 230 | VPusUfsuuaUfgAfUfgg | 305 | AUUAGGCAACAUCCAU | 380 |
| | caucauaaaaL96 | | auGfuUfgccuasasu | | CAUAAAC | |
| AD-523842.1 | usgsuggcUfcAfUfU | 231 | VPusAfsuguUfgCfCfuaa | 306 | AGUGUGGCUCAUUAG | 381 |
| | faggcaacauaL96 | | uGfaGfccacascsu | | GCAACAUC | |
| AD-523833.1 | csusccaaGfuGfUfGf | 232 | VPusCfsuaaUfgAfGfcca | 307 | ACCUCCAAGUGUGGCU | 382 |
| | gcucauuagaL96 | | cAfcUfuggagsgsu | | CAUUAGG | |
| AD-1019328.1 | gsgscaguGfuGfCfA | 233 | VPusUfsagaCfuAfUfuu | 308 | GCGGCAGUGUGCAAAU | 383 |
| | faauagucuaaL96 | | gcAfcAfcugccsgsc | | AGUCUAC | |
| AD-1019355.1 | csgsgcagUfgUfGfC | 234 | VPusAfsgacUfaUfUfugc | 309 | GGCGGCAGUGUGCAAA | 384 |
| | faaauagucuaL96 | | aCfaCfugccgscsc | | UAGUCUA | |
| AD-1019353.1 | gsgscggcAfgUfGfU | 235 | VPusAfscuaUfuUfGfcac | 310 | GAGGCGGCAGUGUGCA | 385 |
| | fgcaaauaguaL96 | | aCfuGfccgccsusc | | AAUAGUC | |
| AD-1019350.1 | gsgsaggcGfgCfAfG | 236 | VPusAfsuuuGfcAfCfacu | 311 | CGGGAGGCGGCAGUGU | 386 |
| | fugugcaaauaL96 | | gCfcGfccuccscsg | | GCAAAUA | |
| AD-1019351.1 | gsasggcgGfcAfGfU | 237 | VPusUfsauuUfgCfAfcac | 312 | GGGAGGCGGCAGUGU | 387 |
| | fgugcaaauaaL96 | | uGfcCfgccucscsc | | GCAAAUAG | |

TABLE 7
Modified Sense and Antisense Strand Sequences of MAPT dsRNA Agents-Screen 2

| | | SEQ | | SEQ | mRNA Target | SEQ |
|---|---|---|---|---|---|---|
| | Sense Sequence | ID | Antisense Sequence | ID | Sequence | ID |
| Duplex ID | 5′ to 3′ | NO: | 5′ to 3′ | NO: | 5′ to 3′ | NO: |
| AD-535094.1 | asgscucgCfaUfGfGfuca | 564 | VPusUfsuuua(Cgn)ug | 652 | CAAGCUCGCAUGG | 740 |
| | guaaaaaL96 | | accaUfgCfgagcususg | | UCAGUAAAAG | |
| AD-535095.1 | gscsucgcAfuGfGfUfcag | 565 | VPusCfsuuuu(Agn)cu | 653 | AAGCUCGCAUGGU | 741 |
| | uaaaagaL96 | | gaccAfuGfcgagcsusu | | CAGUAAAAGC | |
| AD-538647.1 | usasuuguGfuGfUfUfuua | 566 | VPusAfsuuug(Tgn)uaa | 654 | UGUAUUGUGUGUU | 742 |
| | acaaauaL96 | | aacAfcAfcaauascsa | | UUAACAAAUG | |
| AD-535922.1 | csasgcaaCfaAfAfGfgau | 567 | VPusUfsuuca(Agn)auc | 655 | GGCAGCAACAAAG | 743 |
| | uugaaaaL96 | | cuuUfgUfugcugscsc | | GAUUUGAAAC | |
| AD-536317.1 | gscsuaacCfaGfUfUfcuc | 568 | VPusUfsacaa(Agn)gag | 656 | GGGCUAACCAGUU | 744 |
| | uuuguaaL96 | | aacUfgGfuuagcscsc | | CUCUUUGUAA | |
| AD-536911.1 | usasguugGfaUfUfUfguc | 569 | VPusUfsaaac(Agn)gac | 657 | UGUAGUUGGAUUU | 745 |
| | uguuuaaL96 | | aaaUfcCfaacuascsa | | GUCUGUUUAU | |
| AD-538626.1 | gsuscuguGfaAfUfGfucu | 570 | VPusCfsuaua(Tgn)aga | 658 | CUGUCUGUGAAUG | 746 |
| | auauagaL96 | | cauUfcAfcagacsasg | | UCUAUAUAGU | |
| AD-535864.1 | csasggcaAfuUfCfCfuuu | 571 | VPusGfsaauc(Agn)aaa | 659 | CUCAGGCAAUUCCU | 747 |
| | ugauucaL96 | | ggaAfuUfgccugsasg | | UUUGAUUCU | |
| AD-535925.1 | csasacaaAfgGfAfUfuug | 572 | VPusAfsaguu(Tgn)caa | 660 | AGCAACAAAGGAU | 748 |
| | aaacuuaL96 | | aucCfuUfuguugscsu | | UUGAAACUUG | |
| AD-538012.1 | gscsugacUfcAfCfUfuua | 573 | VPusUfsauug(Agn)ua | 661 | CUGCUGACUCACUU | 749 |
| | ucaauaaL96 | | aaguGfaGfucagcsasg | | UAUCAAUAG | |
| AD-536872.1 | gscsagcuGfaAfCfAfuau | 574 | VPusCfsuaug(Tgn)aua | 662 | GAGCAGCUGAACA | 750 |
| | acauagaL96 | | uguUfcAfgcugcsusc | | UAUACAUAGA | |
| AD-536954.1 | asgsgacgCfaUfGfUfauc | 575 | VPusUfsuuca(Agn)ga | 663 | AAAGGACGCAUGU | 751 |
| | uugaaaaL96 | | uacaUfgCfguccususu | | AUCUUGAAAU | |
| AD-536964.1 | usasucuuGfaAfAfUfgcu | 576 | VPusUfsuuac(Agn)agc | 664 | UGUAUCUUGAAAU | 752 |
| | uguaaaaL96 | | auuUfcAfagauascsa | | GCUUGUAAAG | |
| AD-536318.1 | csusaaccAfgUfUfCfucu | 577 | VPusUfsuaca(Agn)aga | 665 | GGCUAACCAGUUC | 753 |
| | uuguaaaL96 | | gaaCfuGfguuagscsc | | UCUUUGUAAG | |
| AD-536976.1 | csusuguaAfaGfAfGfguu | 578 | VPusGfsuuag(Agn)aac | 666 | UGCUUGUAAAGAG | 754 |
| | ucuaacaL96 | | cucUfuUfacaagscsa | | GUUUCUAACC | |
| AD-538630.1 | gsusgaauGfuCfUfAfuau | 579 | VPusUfsacac(Tgn)aua | 667 | CUGUGAAUGUCUA | 755 |
| | aguguaaL96 | | uagAfcAfuucacsasg | | UAUAGUGUAU | |
| AD-538624.1 | csusgucuGfuGfAfAfugu | 580 | VPusAfsuaua(Ggn)aca | 668 | UUCUGUCUGUGAA | 756 |
| | cuauauaL96 | | uucAfcAfgacagsasa | | UGUCUAUAUA | |
| AD-538594.1 | asgsggacAfuGfAfAfauc | 581 | VPusUfsaaga(Tgn)gau | 669 | GGAGGGACAUGAA | 757 |
| | aucuuaaL96 | | uucAfuGfucccuscsc | | AUCAUCUUAG | |
| AD-536915.1 | usgsgauuUfgUfCfUfguu | 582 | VPusAfsgcau(Agn)aac | 670 | GUUGGAUUUGUCU | 758 |
| | uaugcuaL96 | | agaCfaAfauccasasc | | GUUUAUGCUU | |
| AD-536870.1 | gsasgcagCfuGfAfAfcau | 583 | VPusAfsugua(Tgn)aug | 671 | UGGAGCAGCUGAA | 759 |
| | auacauaL96 | | uucAfgCfugcucscsa | | CAUAUACAUA | |
| AD-536236.1 | ascsagaaAfcCfCfUfguu | 584 | VPusCfsaaua(Agn)aac | 672 | CCACAGAAACCCUG | 760 |
| | uuauugaL96 | | aggGfuUfucugusgsg | | UUUUAUUGA | |
| AD-536319.1 | usasaccaGfuUfCfUfcuu | 585 | VPusCfsuuac(Agn)aag | 673 | GCUAACCAGUUCUC | 761 |
| | uguaagaL96 | | agaAfcUfgguuasgsc | | UUUGUAAGG | |
| AD-536966.1 | uscsuugaAfaUfGfCfuug | 586 | VPusUfscuuu(Agn)caa | 674 | UAUCUUGAAAUGC | 762 |
| | uaaagaaL96 | | gcaUfuUfcaagasusa | | UUGUAAAGAG | |
| AD-538643.1 | asgsuguaUfuGfUfGfugu | 587 | VPusGfsuuaa(Agn)aca | 675 | AUAGUGUAUUGUG | 763 |
| | uuuaacaL96 | | cacAfaUfacacusasu | | UGUUUUAACA | |
| AD-536873.1 | csasgcugAfaCfAfUfaua | 588 | VPusUfscuau(Ggn)ua | 676 | AGCAGCUGAACAU | 764 |
| | cauagaaL96 | | uaugUfuCfagcugscsu | | AUACAUAGAU | |
| AD-536952.1 | asasaggaCfgCfAfUfgua | 589 | VPusUfscaag(Agn)uac | 677 | AAAAAGGACGCAU | 765 |
| | ucuugaaL96 | | augCfgUfccuuususu | | GUAUCUUGAA | |
| AD-536959.1 | gscsauguAfuCfUfUfgaa | 590 | VPusAfsagca(Tgn)uuc | 678 | ACGCAUGUAUCUU | 766 |
| | augcuuaL96 | | aagAfuAfcaugcsgsu | | GAAAUGCUUG | |
| AD-537921.1 | ascsgcugGfcUfUfGfuga | 591 | VPusUfsuaag(Agn)uca | 679 | GCACGCUGGCUUG | 767 |
| | ucuuaaaL96 | | caaGfcCfagcgusgsc | | UGAUCUUAAA | |
| AD-538652.1 | ususuuaaCfaAfAfUfgau | 592 | VPusGfsugua(Agn)au | 680 | UGUUUUAACAAAU | 768 |
| | uuacacaL96 | | cauuUfgUfuaaaascsa | | GAUUUACACU | |
| AD-538649.1 | ususguguGfuUfUfUfaac | 593 | VPusUfscauu(Tgn)guu | 681 | UAUUGUGUGUUUU | 769 |
| | aaaugaaL96 | | aaaAfcAfcacaasusa | | AACAAAUGAU | |
| AD-538623.1 | uscsugucUfgUfGfAfaug | 594 | VPusUfsauag(Agn)cau | 682 | UUUCUGUCUGUGA | 770 |
| | ucuauaaL96 | | ucaCfaGfacagasasa | | AUGUCUAUAU | |
| AD-538573.1 | gscsaaguCfcCfAfUfgau | 595 | VPusGfsaaga(Agn)auc | 683 | UUGCAAGUCCCAU | 771 |
| | uucuucaL96 | | augGfgAfcuugcsasa | | GAUUUCUUCG | |
| AD-537920.1 | csascgcuGfgCfUfUfgug | 596 | VPusUfsaaga(Tgn)cac | 684 | GGCACGCUGGCUU | 772 |
| | aucuuaaL96 | | aagCfcAfgcgugscsc | | GUGAUCUUAA | |
| AD-536939.1 | ususcaccAfgAfGfUfgac | 597 | VPusAfsucau(Agn)gu | 685 | GAUUCACCAGAGU | 773 |
| | uaugauaL96 | | cacuCfuGfgugaasusc | | GACUAUGAUA | |
| AD-538015.1 | gsascucaCfuUfUfAfuca | 598 | VPusAfsacua(Tgn)uga | 686 | CUGACUCACUUUA | 774 |
| | auaguuaL96 | | uaaAfgUfgagucsasg | | UCAAUAGUUC | |
| AD-536953.1 | asasggacGfcAfUfGfuau | 599 | VPusUfsucaa(Ggn)aua | 687 | AAAAGGACGCAUG | 775 |
| | cuugaaaL96 | | cauGfcGfuccuususu | | UAUCUUGAAA | |
| AD-536237.1 | csasgaaaCfcCfUfGfuuu | 600 | VPusUfscaau(Agn)aaa | 688 | CACAGAAACCCUGU | 776 |
| | uauugaaL96 | | cagGfgUfuucugsusg | | UUUAUUGAG | |
| AD-538628.1 | csusgugaAfuGfUfCfuau | 601 | VPusCfsacua(Tgn)aua | 689 | GUCUGUGAAUGUC | 777 |
| | auagugaL96 | | gacAfuUfcacagsasc | | UAUAUAGUGU | |
| AD-538632.1 | gsasauguCfuAfUfAfuag | 602 | VPusAfsauac(Agn)cua | 690 | GUGAAUGUCUAUA | 778 |
| | uguauuaL96 | | uauAfgAfcauucsasc | | UAGUGUAUUG | |
| AD-536975.1 | gscsuuguAfaAfGfAfggu | 603 | VPusUfsuaga(Agn)acc | 691 | AUGCUUGUAAAGA | 779 |
| | uucuaaaL96 | | ucuUfuAfcaagcsasu | | GGUUUCUAAC | |
| AD-538599.1 | csasugaaAfuCfAfUfcuu | 604 | VPusUfsaagc(Tgn)aag | 692 | GACAUGAAAUCAU | 780 |
| | agcuuaaL96 | | augAfuUfucaugsusc | | CUUAGCUUAG | |
| AD-536978.1 | usgsuaaaGfaGfGfUfuuc | 605 | VPusGfsgguu(Agn)ga | 693 | CUUGUAAAGAGGU | 781 |
| | uaacccaL96 | | aaccUfcUfuuacasasg | | UUCUAACCCA | |
| AD-536956.1 | gsascgcaUfgUfAfUfcuu | 606 | VPusCfsauuu(Cgn)aag | 694 | AGGACGCAUGUAU | 782 |
| | gaaaugaL96 | | auaCfaUfgcgucscsu | | CUUGAAAUGC | |
| AD-538571.1 | ususgcaaGfuCfCfCfaug | 607 | VPusAfsgaaa(Tgn)cau | 695 | ACUUGCAAGUCCCA | 783 |
| | auuucuaL96 | | gggAfcUfugcaasgsu | | UGAUUUCUU | |
| AD-535921.1 | gscsagcaAfcAfAfAfgga | 608 | VPusUfsucaa(Agn)ucc | 696 | UGGCAGCAACAAA | 784 |
| | uuugaaaL96 | | uuuGfuUfgcugcscsa | | GGAUUUGAAA | |
| AD-538593.1 | gsasgggaCfaUfGfAfaau | 609 | VPusAfsagau(Ggn)au | 697 | GGGAGGGACAUGA | 785 |
| | caucuuaL96 | | uucaUfgUfcccucscsc | | AAUCAUCUUA | |
| AD-537974.1 | gscsuagaUfaGfGfAfuau | 610 | VPusUfsacag(Tgn)aua | 698 | GGGCUAGAUAGGA | 786 |
| | acuguaaL96 | | uccUfaUfcuagcscsc | | UAUACUGUAU | |
| AD-537973.1 | gsgscuagAfuAfGfGfaua | 611 | VPusAfscagu(Agn)ua | 699 | UGGGCUAGAUAGG | 787 |
| | uacuguaL96 | | uccuAfuCfuagccscsa | | AUAUACUGUA | |
| AD-536982.1 | asasgaggUfuUfCfUfaac | 612 | VPusGfsggug(Ggn)gu | 700 | UAAAGAGGUUUCU | 788 |
| | ccacccaL96 | | uagaAfaCfcucuususa | | AACCCACCCU | |
| AD-535918.1 | gsusggcaGfcAfAfCfaaa | 613 | VPusAfsaauc(Cgn)uuu | 701 | CAGUGGCAGCAAC | 789 |
| | ggauuuaL96 | | guuGfcUfgccacsusg | | AAAGGAUUUG | |
| AD-538627.1 | uscsugugAfaUfGfUfcua | 614 | VPusAfscuau(Agn)ua | 702 | UGUCUGUGAAUGU | 790 |
| | uauaguaL96 | | gacaUfuCfacagascsa | | CUAUAUAGUG | |
| AD-536913.1 | gsusuggaUfuUfGfUfcug | 615 | VPusCfsauaa(Agn)cag | 703 | UAGUUGGAUUUGU | 791 |
| | uuuaugaL96 | | acaAfaUfccaacsusa | | CUGUUUAUGC | |
| AD-536869.1 | gsgsagcaGfcUfGfAfaca | 616 | VPusUfsguau(Agn)ug | 704 | CUGGAGCAGCUGA | 792 |
| | uauacaaL96 | | uucaGfcUfgcuccsasg | | ACAUAUACAU | |
| AD-536965.1 | asuscuugAfaAfUfGfcuu | 617 | VPusCfsuuua(Cgn)aag | 705 | GUAUCUUGAAAUG | 793 |
| | guaaagaL96 | | cauUfuCfaagausasc | | CUUGUAAAGA | |
| AD-537914.1 | asasaaggCfaCfGfCfugg | 618 | VPusCfsacaa(Ggn)cca | 706 | UGAAAAGGCACGC | 794 |
| | cuugugaL96 | | gcgUfgCfcuuuuscsa | | UGGCUUGUGA | |
| AD-536504.1 | cscsauacUfgAfGfGfgug | 619 | VPusUfsaauu(Tgn)cac | 707 | CUCCAUACUGAGG | 795 |
| | aaauuaaL96 | | ccuCfaGfuauggsasg | | GUGAAAUUAA | |
| AD-538013.1 | csusgacuCfaCfUfUfuau | 620 | VPusCfsuauu(Ggn)aua | 708 | UGCUGACUCACUU | 796 |
| | caauagaL96 | | aagUfgAfgucagscsa | | UAUCAAUAGU | |
| AD-537579.1 | ususcuggUfuUfGfGfgua | 621 | VPusUfsaacu(Ggn)uac | 709 | ACUUCUGGUUUGG | 797 |
| | caguuaaL96 | | ccaAfaCfcagaasgsu | | GUACAGUUAA | |
| AD-538629.1 | usgsugaaUfgUfCfUfaua | 622 | VPusAfscacu(Agn)uau | 710 | UCUGUGAAUGUCU | 798 |
| | uaguguaL96 | | agaCfaUfucacasgsa | | AUAUAGUGUA | |
| AD-536233.1 | uscscacaGfaAfAfCfccu | 623 | VPusUfsaaaa(Cgn)agg | 711 | GCUCCACAGAAACC | 799 |
| | guuuuaaL96 | | guuUfcUfguggasgsc | | CUGUUUUAU | |
| AD-538141.1 | gsasuuucAfaCfCfAfcau | 624 | VPusUfsagca(Agn)aug | 712 | AUGAUUUCAACCA | 800 |
| | uugcuaaL96 | | uggUfuGfaaaucsasu | | CAUUUGCUAG | |
| AD-538622.1 | ususcuguCfuGfUfGfaau | 625 | VPusAfsuaga(Cgn)auu | 713 | CUUUCUGUCUGUG | 801 |
| | gucuauaL96 | | cacAfgAfcagaasasg | | AAUGUCUAUA | |
| AD-537580.1 | uscsugguUfuGfGfGfuac | 626 | VPusUfsuaac(Tgn)gua | 714 | CUUCUGGUUUGGG | 802 |
| | aguuaaaL96 | | cccAfaAfccagasasg | | UACAGUUAAA | |
| AD-536505.1 | csasuacuGfaGfGfGfuga | 627 | VPusUfsuaau(Tgn)uca | 715 | UCCAUACUGAGGG | 803 |
| | aauuaaaL96 | | cccUfcAfguaugsgsa | | UGAAAUUAAG | |
| AD-537918.1 | gsgscacgCfuGfGfCfuug | 628 | VPusAfsgauc(Agn)caa | 716 | AAGGCACGCUGGC | 804 |
| | ugaucuaL96 | | gccAfgCfgugccsusu | | UUGUGAUCUU | |
| AD-537913.1 | gsasaaagGfcAfCfGfcug | 629 | VPusAfscaag(Cgn)cag | 717 | UUGAAAAGGCACG | 805 |
| | gcuuguaL96 | | cguGfcCfuuuucsasa | | CUGGCUUGUG | |
| AD-538642.1 | usasguguAfuUfGfUfgu | 630 | VPusUfsuaaa(Agn)cac | 718 | UAUAGUGUAUUGU | 806 |
| | guuuuaaaL96 | | acaAfuAfcacuasusa | | GUGUUUUAAC | |
| AD-536877.1 | usgsaacaUfaUfAfCfaua | 631 | VPusAfsacau(Cgn)uau | 719 | GCUGAACAUAUAC | 807 |
| | gauguuaL96 | | guaUfaUfguucasgsc | | AUAGAUGUUG | |
| AD-538650.1 | usgsugugUfuUfUfAfaca | 632 | VPusAfsucau(Tgn)ugu | 720 | AUUGUGUGUUUUA | 808 |
| | aaugauaL96 | | uaaAfaCfacacasasu | | ACAAAUGAUU | |
| AD-538625.1 | usgsucugUfgAfAfUfguc | 633 | VPusUfsauau(Agn)gac | 721 | UCUGUCUGUGAAU | 809 |
| | uauauaaL96 | | auuCfaCfagacasgsa | | GUCUAUAUAG | |
| AD-537911.1 | ususgaaaAfgGfCfAfcgc | 634 | VPusAfsagcc(Agn)gcg | 722 | AAUUGAAAAGGCA | 810 |
| | uggcuuaL96 | | ugcCfuUfuucaasusu | | CGCUGGCUUG | |
| AD-538014.1 | usgsacucAfcUfUfUfauc | 635 | VPusAfscuau(Tgn)gau | 723 | GCUGACUCACUUU | 811 |
| | aauaguaL96 | | aaaGfuGfagucasgsc | | AUCAAUAGUU | |
| AD-538634.1 | asusgucuAfuAfUfAfgug | 636 | VPusAfscaau(Agn)cac | 724 | GAAUGUCUAUAUA | 812 |
| | uauuguaL96 | | uauAfuAfgacaususc | | GUGUAUUGUG | |
| AD-536979.1 | gsusaaagAfgGfUfUfucu | 637 | VPusUfsgggu(Tgn)aga | 725 | UUGUAAAGAGGUU | 813 |
| | aacccaaL96 | | aacCfuCfuuuacsasa | | UCUAACCCAC | |
| AD-538641.1 | asusagugUfaUfUfGfugu | 638 | VPusUfsaaaa(Cgn)aca | 726 | AUAUAGUGUAUUG | 814 |
| | guuuuaaL96 | | caaUfaCfacuausasu | | UGUGUUUUAA | |
| AD-537912.1 | usgsaaaaGfgCfAfCfgcu | 639 | VPusCfsaagc(Cgn)agc | 727 | AUUGAAAAGGCAC | 815 |
| | ggcuugaL96 | | gugCfcUfuuucasasu | | GCUGGCUUGU | |
| AD-537761.1 | csuscauuAfcUfGfCfcaa | 640 | VPusAfsaacu(Ggn)uu | 728 | CCCUCAUUACUGCC | 816 |
| | caguuuaL96 | | ggcaGfuAfaugagsgsg | | AACAGUUUC | |
| AD-537917.1 | asgsgcacGfcUfGfGfcuu | 641 | VPusGfsauca(Cgn)aag | 729 | AAAGGCACGCUGG | 817 |
| | gugaucaL96 | | ccaGfcGfugccususu | | CUUGUGAUCU | |
| AD-537916.1 | asasggcaCfgCfUfGfgcu | 642 | VPusAfsucac(Agn)agc | 730 | AAAAGGCACGCUG | 818 |
| | ugugauaL96 | | cagCfgUfgccuususu | | GCUUGUGAUC | |
| AD-538432.1 | gsasucacCfuGfCfGfugu | 643 | VPusGfsaugg(Ggn)aca | 731 | GUGAUCACCUGCG | 819 |
| | cccaucaL96 | | cgcAfgGfugaucsasc | | UGUCCCAUCU | |
| AD-538529.1 | csuscaccUfcCfUfAfaua | 644 | VPusUfsaagu(Cgn)uau | 732 | GCCUCACCUCCUAA | 820 |
| | gacuuaaL96 | | uagGfaGfgugagsgsc | | UAGACUUAG | |
| AD-537867.1 | csasgccuAfaGfAfUfcau | 645 | VPusUfsaaac(Cgn)aug | 733 | GCCAGCCUAAGAUC | 821 |
| | gguuuaaL96 | | aucUfuAfggcugsgsc | | AUGGUUUAG | |
| AD-536503.1 | uscscauaCfuGfAfGfggu | 646 | VPusAfsauuu(Cgn)acc | 734 | ACUCCAUACUGAG | 822 |
| | gaaauuaL96 | | cucAfgUfauggasgsu | | GGUGAAAUUA | |
| AD-537582.1 | usgsguuuGfgGfUfAfcag | 647 | VPusCfsuuua(Agn)cu | 735 | UCUGGUUUGGGUA | 823 |
| | uuaaagaL96 | | guacCfcAfaaccasgsa | | CAGUUAAAGG | |
| AD-537915.1 | asasaggcAfcGfCfUfggc | 648 | VPusUfscaca(Agn)gcc | 736 | GAAAAGGCACGCU | 824 |
| | uugugaaL96 | | agcGfuGfccuuususc | | GGCUUGUGAU | |
| AD-537919.1 | gscsacgcUfgGfCfUfugu | 649 | VPusAfsagau(Cgn)aca | 737 | AGGCACGCUGGCU | 825 |
| | gaucuuaL96 | | agcCfaGfcgugcscsu | | UGUGAUCUUA | |
| AD-537581.1 | csusgguuUfgGfGfUfaca | 650 | VPusUfsuuaa(Cgn)ug | 738 | UUCUGGUUUGGGU | 826 |
| | guuaaaaL96 | | uaccCfaAfaccagsasa | | ACAGUUAAAG | |
| AD-538483.1 | ususcucuUfcAfGfCfuuu | 651 | VPusCfsuuuu(Cgn)aaa | 739 | AUUUCUCUUCAGC | 827 |
| | gaaaagaL96 | | gcuGfaAfgagaasasu | | UUUGAAAAGG | |

TABLE 8
Modified Sense and Antisense Strand Sequences of MAPT dsRNA Agents-Screen 3

| | | SEQ | | SEQ | mRNA Target | SEQ |
|---|---|---|---|---|---|---|
| | Sense Sequence | ID | Antisense Sequence | ID | Sequence | ID |
| Duplex ID | 5′ to 3′ | NO: | 5′ to 3′ | NO: | 5′ to 3′ | NO: |
| AD-523561.1 | asgscucgCfaUfGfGf | 1014 | VPusUfsuuuAfcUfGfa | 1107 | CAAGCUCGCAUGGU | 1200 |
| | ucaguaaaaaL96 | | ccaUfgCfgagcususg | | CAGUAAAAG | |
| AD-523565.1 | csgscaugGfuCfAfGf | 1015 | VPusUfsugcUfuUfUfa | 1108 | CUCGCAUGGUCAGU | 1201 |
| | uaaaagcaaaL96 | | cugAfcCfaugcgsasg | | AAAAGCAAA | |
| AD-523562.1 | gscsucgcAfuGfGfUf | 1016 | VPusCfsuuuUfaCfUfga | 1109 | AAGCUCGCAUGGUC | 1202 |
| | caguaaaagaL96 | | ccAfuGfcgagcsusu | | AGUAAAAGC | |
| AD-526914.1 | ususgcaaGfuCfCfCfa | 1017 | VPusAfsgaaAfuCfAfu | 1110 | ACUUGCAAGUCCCA | 1203 |
| | ugauuucuaL96 | | gggAfcUfugcaasgsu | | UGAUUUCUU | |
| AD-526394.1 | gsascucaCfuUfUfAf | 1018 | VPusAfsacuAfuUfGfa | 1111 | CUGACUCACUUUAU | 1204 |
| | ucaauaguuaL96 | | uaaAfgUfgagucsasg | | CAAUAGUUC | |
| AD-395452.1 | asasaggaCfgCfAfUfg | 1019 | VPusUfscaaGfaUfAfca | 1112 | AAAAAGGACGCAUG | 1205 |
| | uaucuugaaL96 | | ugCfgUfccuuususu | | UAUCUUGAA | |
| AD-525343.1 | uscsuugaAfaUfGfCf | 1020 | VPusUfscuuUfaCfAfag | 1113 | UAUCUUGAAAUGCU | 1206 |
| | uuguaaagaaL96 | | caUfuUfcaagasusa | | UGUAAAGAG | |
| AD-524274.1 | csasggcaAfuUfCfCfu | 1021 | VPusGfsaauCfaAfAfag | 1114 | CUCAGGCAAUUCCU | 1207 |
| | uuugauucaL96 | | gaAfuUfgccugsasg | | UUUGAUUCU | |
| AD-526956.1 | gsasgggaCfaUfGfAf | 1022 | VPusAfsagaUfgAfUfu | 1115 | GGGAGGGACAUGA | 1208 |
| | aaucaucuuaL96 | | ucaUfgUfcccucscsc | | AAUCAUCUUA | |
| AD-526986.1 | uscsugucUfgUfGfAf | 1023 | VPusUfsauaGfaCfAfuu | 1116 | UUUCUGUCUGUGAA | 1209 |
| | augucuauaaL96 | | caCfaGfacagasasa | | UGUCUAUAU | |
| AD-526296.1 | gscsacgcUfgGfCfUf | 1024 | VPusAfsagaUfcAfCfaa | 1117 | AGGCACGCUGGCUU | 1210 |
| | ugugaucuuaL96 | | gcCfaGfcgugcscsu | | GUGAUCUUA | |
| AD-526988.1 | usgsucugUfgAfAfUf | 1025 | VPusUfsauaUfaGfAfca | 1118 | UCUGUCUGUGAAUG | 1211 |
| | gucuauauaaL96 | | uuCfaCfagacasgsa | | UCUAUAUAG | |
| AD-526957.1 | asgsggacAfuGfAfAf | 1026 | VPusUfsaagAfuGfAfu | 1119 | GGAGGGACAUGAA | 1212 |
| | aucaucuuaaL96 | | uucAfuGfucccuscsc | | AUCAUCUUAG | |
| AD-526993.1 | gsusgaauGfuCfUfAf | 1027 | VPusUfsacaCfuAfUfau | 1120 | CUGUGAAUGUCUAU | 1213 |
| | uauaguguaaL96 | | agAfcAfuucacsasg | | AUAGUGUAU | |
| AD-527013.1 | usgsugugUfuUfUfAf | 1028 | VPusAfsucaUfuUfGfu | 1121 | AUUGUGUGUUUUA | 1214 |
| | acaaaugauaL96 | | uaaAfaCfacacasasu | | ACAAAUGAUU | |
| AD-526936.1 | gscsaaguCfcCfAfUfg | 1029 | VPusGfsaagAfaAfUfca | 1122 | UUGCAAGUCCCAUG | 1215 |
| | auuucuucaL96 | | ugGfgAfcuugcsasa | | AUUUCUUCG | |
| AD-395453.1 | asasggacGfcAfUfGf | 1030 | VPusUfsucaAfgAfUfac | 1123 | AAAAGGACGCAUGU | 1216 |
| | uaucuugaaaL96 | | auGfcGfuccuususu | | AUCUUGAAA | |
| AD-526989.1 | gsuscuguGfaAfUfGf | 1031 | VPusCfsuauAfuAfGfac | 1124 | CUGUCUGUGAAUGU | 1217 |
| | ucuauauagaL96 | | auUfcAfcagacsasg | | CUAUAUAGU | |
| AD-524719.1 | csusaaccAfgUfUfCfu | 1032 | VPusUfsuacAfaAfGfag | 1125 | GGCUAACCAGUUCU | 1218 |
| | cuuuguaaaL96 | | aaCfuGfguuagscsc | | CUUUGUAAG | |
| AD-526423.1 | gsascuguAfuCfCfUf | 1033 | VPusAfsuagCfaAfAfca | 1126 | GAGACUGUAUCCUG | 1219 |
| | guuugcuauaL96 | | ggAfuAfcagucsusc | | UUUGCUAUU | |
| AD-527010.1 | usasuuguGfuGfUfUf | 1034 | VPusAfsuuuGfuUfAfa | 1127 | UGUAUUGUGUGUU | 1220 |
| | uuaacaaauaL96 | | aacAfcAfcaauascsa | | UUAACAAAUG | |
| AD-525305.1 | gsusuggaUfuUfGfUf | 1035 | VPusCfsauaAfaCfAfga | 1128 | UAGUUGGAUUUGU | 1221 |
| | cuguuuaugaL96 | | caAfaUfccaacsusa | | CUGUUUAUGC | |
| AD-526987.1 | csusgucuGfuGfAfAf | 1036 | VPusAfsuauAfgAfCfa | 1129 | UUCUGUCUGUGAAU | 1222 |
| | ugucuauauaL96 | | uucAfcAfgacagsasa | | GUCUAUAUA | |
| AD-524331.1 | gscsagcaAfcAfAfAf | 1037 | VPusUfsucaAfaUfCfcu | 1130 | UGGCAGCAACAAAG | 1223 |
| | ggauuugaaaL96 | | uuGfuUfgcugcscsa | | GAUUUGAAA | |
| AD-525266.1 | gsasgcagCfuGfAfAf | 1038 | VPusAfsuguAfuAfUfg | 1131 | UGGAGCAGCUGAAC | 1224 |
| | cauauacauaL96 | | uucAfgCfugcucscsa | | AUAUACAUA | |
| AD-525342.1 | asuscuugAfaAfUfGf | 1039 | VPusCfsuuuAfcAfAfg | 1132 | GUAUCUUGAAAUGC | 1225 |
| | cuuguaaagaL96 | | cauUfuCfaagausasc | | UUGUAAAGA | |
| AD-526995.1 | gsasauguCfuAfUfAf | 1040 | VPusAfsauaCfaCfUfau | 1133 | GUGAAUGUCUAUA | 1226 |
| | uaguguauuaL96 | | auAfgAfcauucsasc | | UAGUGUAUUG | |
| AD-526298.1 | ascsgcugGfcUfUfGf | 1041 | VPusUfsuaaGfaUfCfac | 1134 | GCACGCUGGCUUGU | 1227 |
| | ugaucuuaaaL96 | | aaGfcCfagcgusgsc | | GAUCUUAAA | |
| AD-524718.1 | gscsuaacCfaGfUfUfc | 1042 | VPusUfsacaAfaGfAfga | 1135 | GGGCUAACCAGUUC | 1228 |
| | ucuuuguaaL96 | | acUfgGfuuagcscsc | | UCUUUGUAA | |
| AD-526392.1 | csusgacuCfaCfUfUfu | 1043 | VPusCfsuauUfgAfUfaa | 1136 | UGCUGACUCACUUU | 1229 |
| | aucaauagaL96 | | agUfgAfgucagscsa | | AUCAAUAGU | |
| AD-526985.1 | ususcuguCfuGfUfGf | 1044 | VPusAfsuagAfcAfUfu | 1137 | CUUUCUGUCUGUGA | 1230 |
| | aaugucuauaL96 | | cacAfgAfcagaasasg | | AUGUCUAUA | |
| AD-527011.1 | asusugugUfgUfUfUf | 1045 | VPusCfsauuUfgUfUfaa | 1138 | GUAUUGUGUGUUU | 1231 |
| | uaacaaaugaL96 | | aaCfaCfacaausasc | | UAACAAAUGA | |
| AD-525341.1 | usasucuuGfaAfAfUf | 1046 | VPusUfsuuaCfaAfGfca | 1139 | UGUAUCUUGAAAU | 1232 |
| | gcuuguaaaaL96 | | uuUfcAfagauascsa | | GCUUGUAAAG | |
| AD-525265.1 | gsgsagcaGfcUfGfAf | 1047 | VPusUfsguaUfaUfGfu | 1140 | CUGGAGCAGCUGAA | 1233 |
| | acauauacaaL96 | | ucaGfcUfgcuccsasg | | CAUAUACAU | |
| AD-527004.1 | asusagugUfaUfUfGf | 1048 | VPusUfsaaaAfcAfCfac | 1141 | AUAUAGUGUAUUG | 1234 |
| | uguguuuuaaL96 | | aaUfaCfacuausasu | | UGUGUUUUAA | |
| AD-525336.1 | gscsauguAfuCfUfUf | 1049 | VPusAfsagcAfuUfUfca | 1142 | ACGCAUGUAUCUUG | 1235 |
| | gaaaugcuuaL96 | | agAfuAfcaugcsgsu | | AAAUGCUUG | |
| AD-525353.1 | csusuguaAfaGfAfGf | 1050 | VPusGfsuuaGfaAfAfcc | 1143 | UGCUUGUAAAGAG | 1236 |
| | guuucuaacaL96 | | ucUfuUfacaagscsa | | GUUUCUAACC | |
| AD-525273.1 | usgsaacaUfaUfAfCfa | 1051 | VPusAfsacaUfcUfAfug | 1144 | GCUGAACAUAUACA | 1237 |
| | uagauguuaL96 | | uaUfaUfguucasgsc | | UAGAUGUUG | |
| AD-524638.1 | uscscacaGfaAfAfCfc | 1052 | VPusUfsaaaAfcAfGfgg | 1145 | GCUCCACAGAAACC | 1238 |
| | cuguuuuaaL96 | | uuUfcUfguggasgsc | | CUGUUUUAU | |
| AD-526350.1 | gsgscuagAfuAfGfGf | 1053 | VPusAfscagUfaUfAfuc | 1146 | UGGGCUAGAUAGG | 1239 |
| | auauacuguaL96 | | cuAfuCfuageescsa | | AUAUACUGUA | |
| AD-526962.1 | csasugaaAfuCfAfUfc | 1054 | VPusUfsaagCfuAfAfga | 1147 | GACAUGAAAUCAUC | 1240 |
| | uuagcuuaaL96 | | ugAfuUfucaugsusc | | UUAGCUUAG | |
| AD-527005.1 | usasguguAfuUfGfUf | 1055 | VPusUfsuaaAfaCfAfca | 1148 | UAUAGUGUAUUGU | 1241 |
| | guguuuuaaaL96 | | caAfuAfcacuasusa | | GUGUUUUAAC | |
| AD-525269.1 | csasgcugAfaCfAfUfa | 1056 | VPusUfscuaUfgUfAfu | 1149 | AGCAGCUGAACAUA | 1242 |
| | uacauagaaL96 | | augUfuCfagcugscsu | | UACAUAGAU | |
| AD-524715.1 | asgsggcuAfaCfCfAf | 1057 | VPusAfsaagAfgAfAfc | 1150 | UUAGGGCUAACCAG | 1243 |
| | guucucuuuaL96 | | uggUfuAfgcccusasa | | UUCUCUUUG | |
| AD-395454.1 | asgsgacgCfaUfGfUfa | 1058 | VPusUfsuucAfaGfAfu | 1151 | AAAGGACGCAUGUA | 1244 |
| | ucuugaaaaL96 | | acaUfgCfguccususu | | UCUUGAAAU | |
| AD-525307.1 | usgsgauuUfgUfCfUf | 1059 | VPusAfsgcaUfaAfAfca | 1152 | GUUGGAUUUGUCU | 1245 |
| | guuuaugcuaL96 | | gaCfaAfauccasasc | | GUUUAUGCUU | |
| AD-525352.1 | gscsuuguAfaAfGfAf | 1060 | VPusUfsuagAfaAfCfcu | 1153 | AUGCUUGUAAAGA | 1246 |
| | gguuucuaaaL96 | | cuUfuAfcaagcsasu | | GGUUUCUAAC | |
| AD-524641.1 | ascsagaaAfcCfCfUfg | 1061 | VPusCfsaauAfaAfAfca | 1154 | CCACAGAAACCCUG | 1247 |
| | uuuuauugaL96 | | ggGfuUfucugusgsg | | UUUUAUUGA | |
| AD-526297.1 | csascgcuGfgCfUfUf | 1062 | VPusUfsaagAfuCfAfca | 1155 | GGCACGCUGGCUUG | 1248 |
| | gugaucuuaaL96 | | agCfcAfgcgugscsc | | UGAUCUUAA | |
| AD-525268.1 | gscsagcuGfaAfCfAf | 1063 | VPusCfsuauGfuAfUfa | 1156 | GAGCAGCUGAACAU | 1249 |
| | uauacauagaL96 | | uguUfcAfgcugcsusc | | AUACAUAGA | |
| AD-526997.1 | asusgucuAfuAfUfAf | 1064 | VPusAfscaaUfaCfAfcu | 1157 | GAAUGUCUAUAUA | 1250 |
| | guguauuguaL96 | | auAfuAfgacaususc | | GUGUAUUGUG | |
| AD-526991.1 | csusgugaAfuGfUfCf | 1065 | VPusCfsacuAfuAfUfag | 1158 | GUCUGUGAAUGUCU | 1251 |
| | uauauagugaL96 | | acAfuUfcacagsasc | | AUAUAGUGU | |
| AD-527012.1 | ususguguGfuUfUfUf | 1066 | VPusUfscauUfuGfUfu | 1159 | UAUUGUGUGUUUU | 1252 |
| | aacaaaugaaL96 | | aaaAfcAfcacaasusa | | AACAAAUGAU | |
| AD-524720.1 | usasaccaGfuUfCfUfc | 1067 | VPusCfsuuaCfaAfAfga | 1160 | GCUAACCAGUUCUC | 1253 |
| | uuuguaagaL96 | | gaAfcUfgguuasgsc | | UUUGUAAGG | |
| AD-525303.1 | usasguugGfaUfUfUf | 1068 | VPusUfsaaaCfaGfAfca | 1161 | UGUAGUUGGAUUU | 1254 |
| | gucuguuuaaL96 | | aaUfcCfaacuascsa | | GUCUGUUUAU | |
| AD-526289.1 | usgsaaaaGfgCfAfCfg | 1069 | VPusCfsaagCfcAfGfcg | 1162 | AUUGAAAAGGCACG | 1255 |
| | cuggcuugaL96 | | ugCfcUfuuucasasu | | CUGGCUUGU | |
| AD-526992.1 | usgsugaaUfgUfCfUf | 1070 | VPusAfscacUfaUfAfua | 1163 | UCUGUGAAUGUCUA | 1256 |
| | auauaguguaL96 | | gaCfaUfucacasgsa | | UAUAGUGUA | |
| AD-525333.1 | gsascgcaUfgUfAfUf | 1071 | VPusCfsauuUfcAfAfga | 1164 | AGGACGCAUGUAUC | 1257 |
| | cuugaaaugaL96 | | uaCfaUfgcgucscsu | | UUGAAAUGC | |
| AD-524335.1 | csasacaaAfgGfAfUfu | 1072 | VPusAfsaguUfuCfAfaa | 1165 | AGCAACAAAGGAUU | 1258 |
| | ugaaacuuaL96 | | ucCfuUfuguugscsu | | UGAAACUUG | |
| AD-526990.1 | uscsugugAfaUfGfUf | 1073 | VPusAfscuaUfaUfAfga | 1166 | UGUCUGUGAAUGUC | 1259 |
| | cuauauaguaL96 | | caUfuCfacagascsa | | UAUAUAGUG | |
| AD-527006.1 | asgsuguaUfuGfUfGf | 1074 | VPusGfsuuaAfaAfCfac | 1167 | AUAGUGUAUUGUG | 1260 |
| | uguuuuaacaL96 | | acAfaUfacacusasu | | UGUUUUAACA | |
| AD-526505.1 | gsasuuucAfaCfCfAfc | 1075 | VPusUfsagcAfaAfUfg | 1168 | AUGAUUUCAACCAC | 1261 |
| | auuugcuaaL96 | | uggUfuGfaaaucsasu | | AUUUGCUAG | |
| AD-525309.1 | ususcaccAfgAfGfUf | 1076 | VPusAfsucaUfaGfUfca | 1169 | GAUUCACCAGAGUG | 1262 |
| | gacuaugauaL96 | | cuCfuGfgugaasusc | | ACUAUGAUA | |
| AD-524328.1 | gsusggcaGfcAfAfCf | 1077 | VPusAfsaauCfcUfUfug | 1170 | CAGUGGCAGCAACA | 1263 |
| | aaaggauuuaL96 | | uuGfcUfgccacsusg | | AAGGAUUUG | |
| AD-395455.1 | gsgsacgcAfuGfUfAf | 1078 | VPusAfsuuuCfaAfGfa | 1171 | AAGGACGCAUGUAU | 1264 |
| | ucuugaaauaL96 | | uacAfuGfcguccsusu | | CUUGAAAUA | |
| AD-526428.1 | usasuccuGfuUfUfGf | 1079 | VPusAfsagcAfaUfAfgc | 1172 | UGUAUCCUGUUUGC | 1265 |
| | cuauugcuuaL96 | | aaAfcAfggauascsa | | UAUUGCUUG | |
| AD-526847.1 | ususcucuUfcAfGfCf | 1080 | VPusCfsuuuUfcAfAfa | 1173 | AUUUCUCUUCAGCU | 1266 |
| | uuugaaaagaL96 | | gcuGfaAfgagaasasu | | UUGAAAAGG | |
| AD-525957.1 | uscsugguUfuGfGfGf | 1081 | VPusUfsuaaCfuGfUfac | 1174 | CUUCUGGUUUGGGU | 1267 |
| | uacaguuaaaL96 | | ccAfaAfccagasasg | | ACAGUUAAA | |
| AD-524332.1 | csasgcaaCfaAfAfGfg | 1082 | VPusUfsuucAfaAfUfcc | 1175 | GGCAGCAACAAAGG | 1268 |
| | auuugaaaaL96 | | uuUfgUfugcugscsc | | AUUUGAAAC | |
| AD-526291.1 | asasaaggCfaCfGfCfu | 1083 | VPusCfsacaAfgCfCfag | 1176 | UGAAAAGGCACGCU | 1269 |
| | ggcuugugaL96 | | cgUfgCfcuuuuscsa | | GGCUUGUGA | |
| AD-526485.1 | usgsccucGfuAfAfCf | 1084 | VPusAfsugaAfaAfGfg | 1177 | ACUGCCUCGUAACC | 1270 |
| | ccuuuucauaL96 | | guuAfcGfaggcasgsu | | CUUUUCAUG | |
| AD-526292.1 | asasaggcAfcGfCfUfg | 1085 | VPusUfscacAfaGfCfca | 1178 | GAAAAGGCACGCUG | 1271 |
| | gcuugugaaL96 | | gcGfuGfccuuususc | | GCUUGUGAU | |
| AD-524642.1 | csasgaaaCfcCfUfGfu | 1086 | VPusUfscaaUfaAfAfac | 1179 | CACAGAAACCCUGU | 1272 |
| | uuuauugaaL96 | | agGfgUfuucugsusg | | UUUAUUGAG | |
| AD-526290.1 | gsasaaagGfcAfCfGfc | 1087 | VPusAfscaaGfcCfAfgc | 1180 | UUGAAAAGGCACGC | 1273 |
| | uggcuuguaL96 | | guGfcCfuuuucsasa | | UGGCUUGUG | |
| AD-525959.1 | usgsguuuGfgGfUfAf | 1088 | VPusCfsuuuAfaCfUfg | 1181 | UCUGGUUUGGGUAC | 1274 |
| | caguuaaagaL96 | | uacCfcAfaaccasgsa | | AGUUAAAGG | |
| AD-526293.1 | asasggcaCfgCfUfGfg | 1089 | VPusAfsucaCfaAfGfcc | 1182 | AAAAGGCACGCUGG | 1275 |
| | cuugugauaL96 | | agCfgUfgccuususu | | CUUGUGAUC | |
| AD-524899.1 | csasuacuGfaGfGfGf | 1090 | VPusUfsuaaUfuUfCfac | 1183 | UCCAUACUGAGGGU | 1276 |
| | ugaaauuaaaL96 | | ccUfcAfguaugsgsa | | GAAAUUAAG | |
| AD-526391.1 | gscsugacUfcAfCfUf | 1091 | VPusUfsauuGfaUfAfaa | 1184 | CUGCUGACUCACUU | 1277 |
| | uuaucaauaaL96 | | guGfaGfucagcsasg | | UAUCAAUAG | |
| AD-525956.1 | ususcuggUfuUfGfGf | 1092 | VPusUfsaacUfgUfAfcc | 1185 | ACUUCUGGUUUGGG | 1278 |
| | guacaguuaaL96 | | caAfaCfcagaasgsu | | UACAGUUAA | |
| AD-525958.1 | csusgguuUfgGfGfUf | 1093 | VPusUfsuuaAfcUfGfu | 1186 | UUCUGGUUUGGGU | 1279 |
| | acaguuaaaaL96 | | accCfaAfaccagsasa | | ACAGUUAAAG | |
| AD-526351.1 | gscsuagaUfaGfGfAf | 1094 | VPusUfsacaGfuAfUfau | 1187 | GGGCUAGAUAGGA | 1280 |
| | uauacuguaaL96 | | ccUfaUfcuagcscsc | | UAUACUGUAU | |
| AD-526138.1 | csuscauuAfcUfGfCfc | 1095 | VPusAfsaacUfgUfUfg | 1188 | CCCUCAUUACUGCC | 1281 |
| | aacaguuuaL96 | | gcaGfuAfaugagsgsg | | AACAGUUUC | |
| AD-524898.1 | cscsauacUfgAfGfGf | 1096 | VPusUfsaauUfuCfAfcc | 1189 | CUCCAUACUGAGGG | 1282 |
| | gugaaauuaaL96 | | cuCfaGfuauggsasg | | UGAAAUUAA | |
| AD-526244.1 | csasgccuAfaGfAfUfc | 1097 | VPusUfsaaaCfcAfUfga | 1190 | GCCAGCCUAAGAUC | 1283 |
| | augguuuaaL96 | | ucUfuAfggcugsgsc | | AUGGUUUAG | |
| AD-525359.1 | asasgaggUfuUfCfUf | 1098 | VPusGfsgguGfgGfUfu | 1191 | UAAAGAGGUUUCU | 1284 |
| | aacccacccaL96 | | agaAfaCfcucuususa | | AACCCACCCU | |
| AD-526393.1 | usgsacucAfcUfUfUf | 1099 | VPusAfscuaUfuGfAfu | 1192 | GCUGACUCACUUUA | 1285 |
| | aucaauaguaL96 | | aaaGfuGfagucasgsc | | UCAAUAGUU | |
| AD-525355.1 | usgsuaaaGfaGfGfUf | 1100 | VPusGfsgguUfaGfAfa | 1193 | CUUGUAAAGAGGU | 1286 |
| | uucuaacccaL96 | | accUfcUfuuacasasg | | UUCUAACCCA | |
| AD-526288.1 | ususgaaaAfgGfCfAf | 1101 | VPusAfsagcCfaGfCfgu | 1194 | AAUUGAAAAGGCAC | 1287 |
| | cgcuggcuuaL96 | | gcCfuUfuucaasusu | | GCUGGCUUG | |
| AD-524897.1 | uscscauaCfuGfAfGf | 1102 | VPusAfsauuUfcAfCfcc | 1195 | ACUCCAUACUGAGG | 1288 |
| | ggugaaauuaL96 | | ucAfgUfauggasgsu | | GUGAAAUUA | |
| AD-526796.1 | gsasucacCfuGfCfGfu | 1103 | VPusGfsaugGfgAfCfac | 1196 | GUGAUCACCUGCGU | 1289 |
| | gucccaucaL96 | | gcAfgGfugaucsasc | | GUCCCAUCU | |
| AD-526295.1 | gsgscacgCfuGfGfCf | 1104 | VPusAfsgauCfaCfAfag | 1197 | AAGGCACGCUGGCU | 1290 |
| | uugugaucuaL96 | | ccAfgCfgugccsusu | | UGUGAUCUU | |
| AD-526294.1 | asgsgcacGfcUfGfGfc | 1105 | VPusGfsaucAfcAfAfgc | 1198 | AAAGGCACGCUGGC | 1291 |
| | uugugaucaL96 | | caGfcGfugccususu | | UUGUGAUCU | |
| AD-525356.1 | gsusaaagAfgGfUfUf | 1106 | VPusUfsgggUfuAfGfa | 1199 | UUGUAAAGAGGUU | 1292 |
| | ucuaacccaaL96 | | aacCfuCfuuuacsasa | | UCUAACCCAC | |

TABLE 9
MAPT Single Dose Screens in BE(2)C Cells-Screen 1

| | 50 nM Dose | | 10 nM Dose | | 1 nM Dose | | 0.1 nM Dose | |
|---|---|---|---|---|---|---|---|---|
| | Avg % | | Avg % | | Avg % | | Avg % | |
| | MAPT | | MAPT | | MAPT | | MAPT | |
| | mRNA | | mRNA | | mRNA | | mRNA | |
| Duplex | Remaining | SD | Remaining | SD | Remaining | SD | Remaining | SD |
| AD-523799.1 | 17.36 | 3.97 | 11.83 | 1.28 | 17.00 | 3.42 | 33.86 | 5.82 |
| AD-523802.1 | 24.65 | 6.12 | 14.26 | 4.22 | 17.60 | 1.38 | 37.77 | 4.80 |
| AD-523795.1 | 15.06 | 1.14 | 14.32 | 4.31 | 19.43 | 2.63 | 49.55 | 5.88 |
| AD-523810.1 | 22.03 | 2.01 | 15.54 | 0.42 | 24.58 | 3.23 | 66.10 | 9.27 |
| AD-523809.1 | 22.64 | 1.86 | 16.37 | 1.29 | 22.27 | 1.48 | 51.72 | 4.70 |
| AD-1019331.1 | 22.45 | 6.03 | 17.14 | 2.18 | 18.12 | 5.03 | 46.43 | 8.15 |
| AD-523801.1 | 30.34 | 5.46 | 17.25 | 1.28 | 23.02 | 0.44 | 50.53 | 3.94 |
| AD-523823.1 | 32.84 | 3.33 | 17.73 | 1.68 | 30.11 | 4.13 | 52.21 | 5.32 |
| AD-523798.1 | 20.68 | 2.76 | 17.96 | 1.61 | 21.10 | 2.03 | 38.97 | 3.21 |
| AD-523816.1 | 24.91 | 6.18 | 18.77 | 1.88 | 29.33 | 5.29 | 54.12 | 7.24 |
| AD-523824.1 | 34.17 | 4.53 | 18.89 | 1.66 | 27.31 | 3.46 | 60.77 | 7.82 |
| AD-523800.1 | 27.52 | 5.67 | 19.43 | 2.27 | 27.63 | 3.56 | 60.07 | 5.86 |
| AD-523796.1 | 19.03 | 6.36 | 20.64 | 3.71 | 21.27 | 3.35 | 54.11 | 3.40 |
| AD-523803.1 | 25.88 | 7.39 | 21.13 | 2.70 | 26.60 | 1.32 | 67.90 | 18.26 |
| AD-523817.1 | 37.63 | 2.85 | 21.47 | 2.78 | 29.58 | 4.88 | 69.18 | 10.99 |
| AD-523825.1 | 23.52 | 3.91 | 22.27 | 6.00 | 30.65 | 8.26 | 69.55 | 14.02 |
| AD-523811.1 | 23.44 | 3.46 | 23.39 | 1.57 | 31.07 | 4.77 | 80.50 | 9.46 |
| AD-523854.1 | 38.58 | 6.09 | 23.51 | 4.93 | 41.01 | 4.24 | 82.38 | 10.53 |
| AD-523797.1 | 34.14 | 5.08 | 25.19 | 1.67 | 31.86 | 1.84 | 66.73 | 4.15 |
| AD-523805.1 | 39.86 | 2.59 | 25.33 | 2.96 | 34.54 | 6.80 | 72.34 | 9.00 |
| AD-523814.1 | 31.62 | 5.51 | 25.33 | 3.91 | 38.60 | 1.56 | 66.76 | 9.04 |
| AD-523804.1 | 34.84 | 5.59 | 25.45 | 1.55 | 32.22 | 6.74 | 68.98 | 4.43 |
| AD-1019356.1 | 30.49 | 5.19 | 25.70 | 1.16 | 37.22 | 3.05 | 83.40 | 4.07 |
| AD-523846.1 | 29.77 | 3.31 | 25.92 | 2.07 | 41.48 | 6.52 | 82.33 | 5.66 |
| AD-523808.1 | 41.79 | 5.30 | 26.76 | 2.40 | 33.67 | 3.71 | 74.54 | 4.14 |
| AD-523835.1 | 30.93 | 7.93 | 26.84 | 2.16 | 39.37 | 2.31 | 62.21 | 4.90 |
| AD-1019357.1 | 36.22 | 1.99 | 26.90 | 3.71 | 37.60 | 3.98 | 76.42 | 5.26 |
| AD-523853.1 | 27.78 | 6.30 | 28.49 | 4.67 | 43.46 | 5.81 | 88.34 | 9.82 |
| AD-523819.1 | N/A | N/A | 28.54 | 3.64 | 42.29 | 7.21 | 93.19 | 4.81 |
| AD-523830.1 | 34.94 | 3.25 | 29.70 | 1.93 | 46.68 | 9.09 | 84.11 | 14.32 |
| AD-523834.1 | 31.77 | 2.15 | 29.97 | 0.78 | 50.66 | 10.05 | 79.85 | 15.25 |
| AD-523850.1 | 35.59 | 7.65 | 30.23 | 0.56 | 32.27 | 2.34 | 72.88 | 4.06 |
| AD-523820.1 | 41.60 | 4.75 | 30.69 | 3.92 | 63.61 | 3.48 | 86.22 | 4.77 |
| AD-523849.1 | 36.88 | 6.27 | 30.74 | 9.03 | 65.52 | 11.32 | 117.05 | 8.49 |
| AD-523845.1 | 41.26 | 4.71 | 31.05 | 3.90 | 52.35 | 9.41 | 87.04 | 13.11 |
| AD-393758.3 | 102.71 | 7.60 | 31.14 | 9.50 | 48.85 | 7.58 | 94.84 | 5.35 |
| AD-523848.1 | 38.58 | 0.98 | 31.32 | 4.94 | 30.21 | 6.74 | 82.58 | 19.58 |
| AD-523840.1 | 38.40 | 3.17 | 31.47 | 5.14 | 49.17 | 3.50 | 80.62 | 7.66 |
| AD-523828.1 | 38.31 | 0.88 | 31.80 | 1.25 | 56.98 | 11.05 | 96.66 | 8.50 |
| AD-523822.1 | 40.68 | 3.68 | 32.06 | 7.63 | 48.94 | 5.35 | 73.53 | 9.58 |
| AD-523806.1 | 42.23 | 3.39 | 33.39 | 4.10 | 38.73 | 4.97 | 76.41 | 7.34 |
| AD-523831.1 | 45.89 | 4.78 | 33.75 | 4.48 | 36.69 | 5.48 | 76.20 | 6.09 |
| AD-393757.1 | 28.66 | 5.31 | 33.83 | 4.47 | 45.96 | 8.04 | 90.16 | 7.54 |
| AD-523839.1 | 47.43 | 3.54 | 34.37 | 2.50 | 54.71 | 3.17 | 87.09 | 7.01 |
| AD-523815.1 | 51.86 | 3.12 | 34.40 | 4.52 | 43.71 | 10.84 | 78.90 | 3.64 |
| AD-523856.1 | 47.69 | 9.26 | 34.49 | 1.24 | 49.13 | 4.20 | 106.48 | 4.88 |
| AD-1019330.1 | 42.05 | 8.45 | 34.61 | 5.05 | 45.07 | 5.15 | 88.42 | 8.85 |
| AD-523829.1 | 46.44 | 4.53 | 38.58 | 3.44 | 61.47 | 4.02 | 84.88 | 9.60 |
| AD-523855.1 | 58.26 | 9.58 | 38.87 | 5.19 | 58.64 | 6.76 | 91.31 | 33.98 |
| AD-523836.1 | 46.88 | 8.29 | 39.08 | 4.02 | 60.37 | 8.65 | 84.60 | 12.08 |
| AD-1019329.1 | 46.82 | 5.33 | 40.62 | 4.47 | 50.55 | 6.13 | 79.08 | 7.40 |
| AD-523843.1 | 44.23 | 2.98 | 41.23 | 4.16 | 56.43 | 7.41 | 83.33 | 14.89 |
| AD-523807.1 | 53.76 | 7.43 | 41.33 | 7.22 | 53.88 | 6.20 | 76.36 | 8.12 |
| AD-523821.1 | 57.09 | 5.83 | 43.35 | 3.19 | 68.52 | 7.26 | 96.94 | 7.49 |
| AD-523826.1 | 66.07 | 3.43 | 43.54 | 4.85 | 85.29 | 8.12 | 113.96 | 30.15 |
| AD-523847.1 | 62.91 | 2.16 | 44.18 | 5.29 | 65.26 | 11.48 | 99.54 | 8.60 |
| AD-523786.1 | 57.38 | 1.50 | 47.58 | 10.57 | 59.96 | 6.62 | 107.01 | 4.44 |
| AD-523812.1 | N/A | N/A | 47.59 | 4.50 | 61.83 | 2.47 | 107.93 | 3.85 |
| AD-523827.1 | 62.22 | 4.24 | 48.54 | 3.90 | 74.19 | 9.00 | 114.87 | 3.91 |
| AD-523844.1 | 60.08 | 3.38 | 50.30 | 5.01 | 75.30 | 8.54 | 84.25 | 8.63 |
| AD-523851.1 | 60.77 | 13.33 | 53.50 | 4.43 | 74.46 | 6.10 | 112.55 | 11.72 |
| AD-523818.1 | 57.31 | 6.99 | 53.83 | 6.54 | 69.76 | 6.65 | 101.09 | 12.70 |
| AD-523832.1 | 54.56 | 8.91 | 56.40 | 7.44 | 79.87 | 12.26 | 122.46 | 16.33 |
| AD-523813.1 | 86.63 | 8.22 | 65.84 | 5.07 | 74.62 | 9.81 | 86.86 | 8.21 |
| AD-523841.1 | 70.75 | 1.45 | 71.81 | 17.54 | 100.34 | 11.20 | 126.55 | 3.27 |
| AD-1019352.1 | 90.08 | 4.18 | 81.29 | 7.58 | 82.18 | 8.87 | 106.93 | 10.34 |
| AD-1019354.1 | 100.85 | 16.07 | 84.77 | 8.38 | 84.08 | 14.32 | 115.08 | 11.91 |
| AD-523852.1 | 104.45 | 6.49 | 85.75 | 5.16 | 105.39 | 7.11 | 124.46 | 13.53 |
| AD-523842.1 | 101.86 | 4.42 | 86.70 | 6.16 | 104.06 | 5.91 | 117.32 | 12.82 |
| AD-523833.1 | 66.80 | 6.03 | 88.60 | 33.58 | 80.46 | 22.83 | 100.71 | 19.71 |
| AD-1019328.1 | 100.92 | 11.47 | 90.93 | 7.76 | 93.23 | 13.25 | 100.56 | 4.59 |
| AD-1019355.1 | 89.32 | 13.16 | 99.94 | 15.77 | 90.59 | 5.30 | 95.12 | 3.94 |
| AD-1019353.1 | 118.09 | 10.16 | 100.93 | 9.24 | 92.43 | 3.47 | 109.80 | 3.42 |
| AD-1019350.1 | 123.59 | 27.60 | 119.47 | 14.52 | 110.74 | 9.75 | 107.58 | 8.73 |
| AD-1019351.1 | 126.66 | 52.81 | 138.14 | 16.24 | 121.09 | 3.59 | 112.83 | 10.46 |

TABLE 10
MAPT Single Dose Screens in BE(2)C Cells-Screen 2

| | 10 nM Dose | | 1 nM Dose | | 0.1 nM Dose | |
|---|---|---|---|---|---|---|
| | Avg % | | Avg % | | Avg % | |
| | MAPT | | MAPT | | MAPT | |
| | mRNA | | mRNA | | mRNA | |
| Duplex | Remaining | SD | Remaining | SD | Remaining | SD |
| AD-535094.1 | 35.76 | 3.97 | 46.85 | 7.73 | 73.63 | 8.23 |
| AD-535095.1 | 47.10 | 5.31 | 57.17 | 5.03 | 84.07 | 8.69 |
| AD-538647.1 | 48.79 | 1.19 | 51.77 | 5.37 | 69.46 | 5.30 |
| AD-535922.1 | 49.19 | 4.51 | 58.00 | 3.65 | 66.15 | 4.62 |
| AD-536317.1 | 52.43 | 6.66 | 67.63 | 16.86 | 76.08 | 4.48 |
| AD-536911.1 | 52.76 | 7.29 | 73.99 | 19.66 | 60.59 | 12.06 |
| AD-538626.1 | 52.98 | 4.51 | 67.94 | 7.88 | 87.83 | 11.34 |
| AD-535864.1 | 53.86 | 1.57 | 53.45 | 4.96 | 58.45 | 7.29 |
| AD-535925.1 | 54.21 | 16.94 | 55.64 | 7.40 | 67.07 | 14.57 |
| AD-538012.1 | 54.39 | 5.16 | 68.15 | 11.29 | 80.64 | 10.99 |
| AD-536872.1 | 56.50 | 3.43 | 63.99 | 5.43 | 74.55 | 7.14 |
| AD-536954.1 | 57.36 | 6.40 | 67.98 | 5.59 | 64.86 | 5.82 |
| AD-536964.1 | 57.85 | 7.00 | 63.81 | 9.50 | 78.27 | 9.12 |
| AD-536318.1 | 58.28 | 5.21 | 74.33 | 10.15 | 74.24 | 3.98 |
| AD-536976.1 | 58.40 | 5.31 | 69.37 | 6.99 | 77.16 | 8.95 |
| AD-538630.1 | 58.93 | 4.10 | 71.69 | 5.10 | 80.90 | 5.93 |
| AD-538624.1 | 59.72 | 3.62 | 76.16 | 7.62 | 88.40 | 6.89 |
| AD-538594.1 | 60.04 | 5.54 | 68.11 | 3.65 | 96.64 | 8.71 |
| AD-536915.1 | 60.28 | 4.41 | 66.46 | 5.44 | 81.81 | 15.47 |
| AD-536870.1 | 60.55 | 6.78 | 67.17 | 5.88 | 67.38 | 7.16 |
| AD-536236.1 | 60.81 | 4.65 | 72.33 | 2.87 | 81.77 | 6.44 |
| AD-536319.1 | 60.97 | 3.59 | 78.50 | 6.73 | 82.85 | 5.52 |
| AD-536966.1 | 61.25 | 8.38 | 65.89 | 5.53 | 85.73 | 15.42 |
| AD-538643.1 | 61.41 | 7.04 | 67.98 | 5.76 | 82.79 | 8.84 |
| AD-536873.1 | 62.21 | 2.32 | 72.29 | 7.01 | 78.21 | 10.07 |
| AD-536952.1 | 62.32 | 6.66 | 65.83 | 7.80 | 76.44 | 11.24 |
| AD-536959.1 | 62.62 | 22.64 | 71.73 | 16.89 | 63.72 | 16.30 |
| AD-537921.1 | 62.72 | 6.15 | 77.86 | 6.92 | 101.16 | 7.46 |
| AD-538652.1 | 62.75 | 2.52 | 66.45 | 5.20 | 85.73 | 7.62 |
| AD-538649.1 | 62.78 | 5.41 | 69.25 | 5.14 | 79.92 | 5.74 |
| AD-538623.1 | 62.95 | 4.71 | 77.45 | 4.67 | 93.85 | 10.54 |
| AD-538573.1 | 63.02 | 10.35 | 71.64 | 4.35 | 96.74 | 7.54 |
| AD-537920.1 | 63.37 | 11.00 | 69.38 | 5.51 | 96.52 | 13.11 |
| AD-536939.1 | 63.57 | 5.74 | 71.47 | 5.84 | 83.48 | 16.47 |
| AD-538015.1 | 63.70 | 8.95 | 85.29 | 13.45 | 94.52 | 15.51 |
| AD-536953.1 | 63.93 | 7.91 | 66.90 | 6.78 | 72.74 | 4.40 |
| AD-536237.1 | 64.02 | 4.11 | 72.66 | 8.39 | 82.24 | 11.96 |
| AD-538628.1 | 64.33 | 5.43 | 70.86 | 3.41 | 87.75 | 6.31 |
| AD-538632.1 | 64.48 | 4.39 | 73.73 | 9.24 | 97.61 | 8.34 |
| AD-536975.1 | 64.98 | 9.64 | 70.42 | 9.15 | 69.13 | 7.30 |
| AD-538599.1 | 65.71 | 6.32 | 66.54 | 8.25 | 93.84 | 5.77 |
| AD-536978.1 | 66.37 | 7.47 | 65.89 | 5.50 | 77.09 | 7.81 |
| AD-536956.1 | 67.30 | 6.10 | 77.35 | 9.48 | 80.58 | 7.54 |
| AD-538571.1 | 68.13 | 20.52 | 84.47 | 18.75 | 102.13 | 30.34 |
| AD-535921.1 | 68.19 | 8.02 | 73.24 | 7.87 | 74.22 | 6.27 |
| AD-538593.1 | 68.56 | 3.04 | 81.22 | 2.63 | 104.96 | 4.62 |
| AD-537974.1 | 68.68 | 2.97 | 71.22 | 5.75 | 97.28 | 5.14 |
| AD-537973.1 | 69.43 | 10.63 | 81.52 | 8.52 | 112.03 | 1.48 |
| AD-536982.1 | 69.89 | 19.69 | 85.54 | 37.34 | 82.26 | 33.94 |
| AD-535918.1 | 70.04 | 7.81 | 75.07 | 4.56 | 78.75 | 6.80 |
| AD-538627.1 | 70.23 | 7.23 | 77.23 | 7.74 | 95.64 | 5.67 |
| AD-536913.1 | 70.95 | 13.00 | 73.73 | 15.50 | 98.54 | 13.42 |
| AD-536869.1 | 71.88 | 6.62 | 84.66 | 2.07 | 80.49 | 10.02 |
| AD-536965.1 | 72.02 | 4.46 | 76.02 | 5.30 | 99.07 | 7.12 |
| AD-537914.1 | 72.08 | 5.66 | 82.07 | 2.69 | 107.92 | 8.77 |
| AD-536504.1 | 72.23 | 3.63 | 83.85 | 15.57 | 103.03 | 9.41 |
| AD-538013.1 | 72.37 | 7.91 | 87.46 | 5.78 | 98.39 | 7.19 |
| AD-537579.1 | 72.49 | 6.16 | 82.27 | 12.01 | 100.88 | 8.48 |
| AD-538629.1 | 73.44 | 5.16 | 79.31 | 3.85 | 104.68 | 9.84 |
| AD-536233.1 | 73.57 | 12.33 | 79.27 | 11.10 | 92.54 | 15.86 |
| AD-538141.1 | 73.58 | 2.10 | 79.05 | 4.13 | 104.80 | 16.39 |
| AD-538622.1 | 73.71 | 5.63 | 79.32 | 3.90 | 99.78 | 7.36 |
| AD-537580.1 | 73.92 | 12.56 | 91.82 | 8.93 | 114.56 | 10.74 |
| AD-536505.1 | 76.21 | 3.52 | 91.14 | 8.18 | 102.96 | 13.26 |
| AD-537918.1 | 76.41 | 5.11 | 82.87 | 15.29 | 101.61 | 13.29 |
| AD-537913.1 | 76.78 | 6.94 | 89.67 | 10.98 | 116.55 | 13.66 |
| AD-538642.1 | 76.78 | 10.38 | 78.85 | 1.90 | 94.35 | 11.27 |
| AD-536877.1 | 77.42 | 6.51 | 89.31 | 13.19 | 90.03 | 16.22 |
| AD-538650.1 | 77.44 | 7.13 | 82.05 | 11.20 | 103.07 | 6.80 |
| AD-538625.1 | 77.58 | 29.08 | 92.50 | 30.50 | 105.00 | 26.42 |
| AD-537911.1 | 78.19 | 6.04 | 84.02 | 5.02 | 102.26 | 10.54 |
| AD-538014.1 | 78.92 | 8.65 | 91.67 | 10.62 | 103.65 | 7.94 |
| AD-538634.1 | 79.38 | 5.33 | 92.21 | 11.29 | 102.96 | 11.07 |
| AD-536979.1 | 80.06 | 7.58 | 83.89 | 9.75 | 83.49 | 9.04 |
| AD-538641.1 | 82.10 | 16.21 | 108.21 | 33.90 | 106.27 | 20.95 |
| AD-537912.1 | 82.11 | 8.49 | 90.65 | 7.62 | 117.90 | 9.60 |
| AD-537761.1 | 82.92 | 9.96 | 89.07 | 9.42 | 96.90 | 3.72 |
| AD-537917.1 | 83.41 | 6.99 | 93.61 | 12.88 | 94.23 | 7.10 |
| AD-537916.1 | 83.48 | 8.36 | 93.61 | 6.79 | 100.30 | 3.39 |
| AD-538432.1 | 84.04 | 12.10 | 88.02 | 4.69 | 118.69 | 12.50 |
| AD-538529.1 | 86.01 | 6.49 | 100.18 | 3.64 | 110.99 | 17.88 |
| AD-537867.1 | 86.51 | 7.59 | 104.38 | 17.22 | 98.08 | 7.46 |
| AD-536503.1 | 89.05 | 17.95 | 96.08 | 13.91 | 80.32 | 18.37 |
| AD-537582.1 | 89.85 | 4.17 | 114.48 | 4.03 | 110.08 | 14.89 |
| AD-537915.1 | 90.25 | 14.83 | 109.37 | 7.19 | 128.31 | 18.33 |
| AD-537919.1 | 91.79 | 17.57 | 102.61 | 16.28 | 118.80 | 34.98 |
| AD-537581.1 | 94.66 | 8.07 | 98.82 | 12.41 | 116.58 | 8.07 |
| AD-538483.1 | 100.69 | 3.19 | 110.69 | 9.92 | 104.44 | 11.39 |

TABLE 11
MAPT Single Dose Screens in BE(2)C Cells-Screen 3

| | 10 nM Dose | | 1 nM Dose | | 0.1 nM Dose | |
|---|---|---|---|---|---|---|
| | Avg % | | Avg % | | Avg % | |
| | MAPT | | MAPT | | MAPT | |
| | mRNA | | mRNA | | mRNA | |
| Duplex | Remaining | SD | Remaining | SD | Remaining | SD |
| AD-523561.1 | 24.25 | 4.75 | 41.99 | 4.98 | 82.19 | 23.42 |
| AD-523565.1 | 27.04 | 2.31 | 38.72 | 1.37 | 64.07 | 18.18 |
| AD-523562.1 | 31.34 | 4.59 | 63.36 | 2.89 | 79.88 | 8.60 |
| AD-526914.1 | 51.27 | 5.89 | 68.78 | 8.49 | 73.60 | 10.78 |
| AD-526394.1 | 51.80 | 4.57 | 68.62 | 7.93 | 85.80 | 13.09 |
| AD-395452.1 | 52.02 | 6.28 | 70.03 | 2.56 | 71.84 | 2.62 |
| AD-525343.1 | 53.14 | 2.47 | 73.00 | 9.09 | 65.65 | 5.26 |
| AD-524274.1 | 53.18 | 11.25 | 73.03 | 13.76 | 74.86 | 16.82 |
| AD-526956.1 | 55.49 | 2.40 | 69.19 | 3.74 | 83.47 | 5.73 |
| AD-526986.1 | 55.75 | 12.71 | 67.26 | 6.74 | 82.19 | 5.91 |
| AD-526296.1 | 57.10 | 7.67 | 62.13 | 1.83 | 88.80 | 5.26 |
| AD-526988.1 | 57.17 | 4.10 | 68.30 | 1.72 | 70.09 | 2.53 |
| AD-526957.1 | 57.35 | 2.66 | 71.03 | 6.52 | 83.66 | 8.91 |
| AD-526993.1 | 57.49 | 2.34 | 73.71 | 10.34 | 74.47 | 7.49 |
| AD-527013.1 | 59.03 | 9.70 | 78.09 | 9.74 | 83.15 | 9.66 |
| AD-526936.1 | 59.58 | 2.95 | 76.70 | 5.34 | 82.47 | 1.93 |
| AD-395453.1 | 59.92 | 9.75 | 76.90 | 5.81 | 79.27 | 1.57 |
| AD-526989.1 | 60.47 | 8.42 | 79.80 | 9.09 | 79.67 | 9.60 |
| AD-524719.1 | 60.48 | 1.36 | 76.63 | 2.48 | 95.71 | 6.15 |
| AD-526423.1 | 60.79 | 7.37 | 71.34 | 2.60 | 80.78 | 2.42 |
| AD-527010.1 | 60.86 | 8.24 | 71.48 | 7.52 | 76.33 | 6.19 |
| AD-525305.1 | 61.31 | 9.29 | 101.55 | 49.60 | 71.50 | 3.58 |
| AD-526987.1 | 61.65 | 7.18 | 101.29 | 40.95 | 93.55 | 14.50 |
| AD-524331.1 | 61.89 | 7.55 | 69.03 | 4.56 | 96.90 | 9.09 |
| AD-525266.1 | 62.38 | 0.43 | 81.15 | 9.74 | 78.98 | 10.39 |
| AD-525342.1 | 62.96 | 2.46 | 73.61 | 4.98 | 67.30 | 3.67 |
| AD-526995.1 | 63.38 | 5.58 | 73.78 | 4.08 | 79.53 | 10.96 |
| AD-526298.1 | 63.43 | 9.00 | 61.85 | 5.32 | 89.31 | 8.65 |
| AD-524718.1 | 63.50 | 2.14 | 92.54 | 9.33 | 105.11 | 6.99 |
| AD-526392.1 | 63.79 | 9.35 | 65.84 | 9.52 | 75.66 | 3.01 |
| AD-526985.1 | 63.91 | 14.65 | 76.32 | 2.35 | 78.06 | 6.17 |
| AD-527011.1 | 64.03 | 3.23 | 78.11 | 8.73 | 78.45 | 5.83 |
| AD-525341.1 | 64.23 | 5.92 | 72.27 | 5.91 | 67.06 | 7.45 |
| AD-525265.1 | 64.79 | 6.18 | 75.73 | 10.69 | 87.89 | 9.59 |
| AD-527004.1 | 64.82 | 7.28 | 63.29 | 4.61 | 76.33 | 3.53 |
| AD-525336.1 | 64.83 | 11.12 | 80.03 | 20.95 | 67.48 | 5.03 |
| AD-525353.1 | 64.90 | 5.94 | 85.77 | 10.42 | 91.67 | 11.10 |
| AD-525273.1 | 65.56 | 5.72 | 78.29 | 12.90 | 78.31 | 19.70 |
| AD-524638.1 | 65.61 | 1.80 | 92.33 | 21.29 | 90.73 | 7.19 |
| AD-526350.1 | 65.71 | 6.19 | 63.29 | 4.00 | 87.15 | 5.74 |
| AD-526962.1 | 65.96 | 10.41 | 75.90 | 7.41 | 89.12 | 5.59 |
| AD-527005.1 | 65.99 | 4.44 | 64.80 | 10.69 | 75.15 | 6.07 |
| AD-525269.1 | 66.10 | 2.88 | 83.00 | 6.51 | 69.89 | 10.33 |
| AD-524715.1 | 66.47 | 3.71 | 84.61 | 15.13 | 89.26 | 15.60 |
| AD-395454.1 | 66.86 | 7.80 | 87.90 | 3.70 | 64.50 | 14.56 |
| AD-525307.1 | 66.97 | 6.41 | 74.53 | 7.67 | 65.62 | 4.65 |
| AD-525352.1 | 67.17 | 13.74 | 73.45 | 9.77 | 74.40 | 6.13 |
| AD-524641.1 | 67.37 | 2.96 | 69.97 | 9.15 | 81.33 | 9.62 |
| AD-526297.1 | 67.73 | 3.10 | 61.09 | 2.81 | 81.82 | 3.96 |
| AD-525268.1 | 67.83 | 5.44 | 78.87 | 12.21 | 96.08 | 2.23 |
| AD-526997.1 | 68.00 | 9.39 | 92.04 | 34.36 | 102.14 | 18.87 |
| AD-526991.1 | 68.04 | 5.87 | 79.31 | 8.41 | 83.68 | 3.96 |
| AD-527012.1 | 68.67 | 4.36 | 76.25 | 4.13 | 78.09 | 6.83 |
| AD-524720.1 | 68.77 | 2.59 | 82.86 | 10.38 | 112.52 | 15.70 |
| AD-525303.1 | 69.44 | 15.86 | 107.37 | 33.92 | 123.02 | 51.68 |
| AD-526289.1 | 69.83 | 4.96 | 84.13 | 9.96 | 86.99 | 5.63 |
| AD-526992.1 | 69.85 | 6.36 | 76.94 | 7.30 | 83.97 | 12.58 |
| AD-525333.1 | 69.96 | 8.49 | 110.83 | 33.93 | 123.94 | 65.67 |
| AD-524335.1 | 70.15 | 22.32 | 74.57 | 26.56 | 82.47 | 9.69 |
| AD-526990.1 | 70.16 | 2.78 | 88.92 | 9.37 | 82.68 | 8.97 |
| AD-527006.1 | 70.32 | 9.10 | 73.70 | 7.13 | 77.32 | 4.98 |
| AD-526505.1 | 71.05 | 1.71 | 68.69 | 10.79 | 89.52 | 9.27 |
| AD-525309.1 | 71.25 | 6.44 | 74.02 | 14.37 | 75.43 | 12.20 |
| AD-524328.1 | 71.41 | 4.91 | 75.62 | 9.86 | 91.35 | 14.35 |
| AD-395455.1 | 71.54 | 12.98 | 86.22 | 6.66 | 79.04 | 11.18 |
| AD-526428.1 | 72.21 | 3.20 | 68.14 | 8.91 | 82.27 | 4.63 |
| AD-526847.1 | 72.53 | 5.07 | 78.38 | 4.07 | 94.95 | 12.28 |
| AD-525957.1 | 72.71 | 3.10 | 73.73 | 4.87 | 82.24 | 6.38 |
| AD-524332.1 | 73.34 | 3.13 | 86.68 | 9.09 | 121.33 | 17.30 |
| AD-526291.1 | 73.45 | 10.45 | 82.25 | 9.88 | 82.01 | 7.79 |
| AD-526485.1 | 75.46 | 7.07 | 88.92 | 17.06 | 110.64 | 6.07 |
| AD-526292.1 | 76.34 | 3.87 | 84.96 | 5.08 | 91.33 | 6.41 |
| AD-524642.1 | 76.36 | 4.44 | 89.36 | 5.71 | 78.17 | 9.16 |
| AD-526290.1 | 76.40 | 0.35 | 81.85 | 2.77 | 93.57 | 6.41 |
| AD-525959.1 | 80.21 | 5.70 | 78.87 | 10.19 | 94.76 | 11.52 |
| AD-526293.1 | 80.56 | 4.21 | 87.13 | 12.23 | 90.70 | 13.76 |
| AD-524899.1 | 80.63 | 7.75 | 99.24 | 7.93 | 96.78 | 3.60 |
| AD-526391.1 | 81.11 | 11.53 | 67.87 | 4.96 | 88.18 | 5.14 |
| AD-525956.1 | 81.17 | 12.92 | 82.75 | 4.11 | 76.04 | 7.59 |
| AD-525958.1 | 81.48 | 5.89 | 97.77 | 16.51 | 86.08 | 9.55 |
| AD-526351.1 | 81.74 | 7.87 | 80.06 | 6.54 | 83.31 | 5.66 |
| AD-526138.1 | 82.32 | 1.60 | 78.42 | 13.50 | 86.18 | 3.40 |
| AD-524898.1 | 83.75 | 11.29 | 133.26 | 47.06 | 89.58 | 15.95 |
| AD-526244.1 | 85.72 | 8.98 | 81.31 | 12.02 | 88.47 | 4.25 |
| AD-525359.1 | 88.09 | 37.42 | 79.82 | 4.76 | 78.34 | 2.90 |
| AD-526393.1 | 90.24 | 27.07 | 77.17 | 13.67 | 83.78 | 12.77 |
| AD-525355.1 | 91.77 | 20.82 | 95.83 | 12.89 | 91.45 | 4.65 |
| AD-526288.1 | 93.76 | 43.34 | 71.19 | 8.02 | 94.88 | 12.86 |
| AD-524897.1 | 96.55 | 23.90 | 129.17 | 45.05 | 96.85 | 22.02 |
| AD-526796.1 | 104.68 | 6.01 | 94.28 | 11.15 | 105.95 | 5.95 |
| AD-526295.1 | 107.65 | 29.68 | 103.40 | 23.46 | 98.05 | 19.18 |
| AD-526294.1 | 112.78 | 6.67 | 99.54 | 7.26 | 89.79 | 6.44 |
| AD-525356.1 | 129.10 | 42.23 | 111.99 | 33.71 | 82.86 | 5.42 |

TABLE 12
Unmodified Sense and Antisense Strand Sequences of MAPT dsRNA Agents-Screen 4

| | Sense | SEQ | | Range | Antisense | SEQ | | Range |
|---|---|---|---|---|---|---|---|---|
| Duplex | Sequence | ID | Source and | in NM_ | Sequence | ID | Source and | in NM_ |
| Name | 5’ to 3’ | NO: | Range | 001038609.2 | 5’ to 3’ | NO: | Range | 001038609.2 |
| AD- | AGUGUGCAAAU | 1293 | NM_ | 1065-1085 | UUUGUAGACU | 1341 | NM_ | 1063-1085 |
| 393758.1 | AGUCUACAAA | | 001038609.2_ | | AUUUGCACAC | | 001038609.2_ | |
| | | | 1065-1085_ | | UGC | | 1063-1085_ | |
| | | | G21U_s | | | | C1A_as | |
| AD- | ACAGAGUCCAG | 1294 | NM_ | 1195-1215 | UAAUCUUCGA | 1342 | NM_ | 1193-1215 |
| 393888.1 | UCGAAGAUUA | | 001038609.2_ | | CUGGACUCUG | | 001038609.2_ | |
| | | | 1195-1215_ | | UCC | | 1193-1215_ | |
| | | | G21U_s | | | | C1A_as | |
| AD- | GUGUGCAAAUA | 1295 | NM_ | 1066-1086 | UCUUGUAGAC | 1343 | NM_ | 1064-1086 |
| 393759.1 | GUCUACAAGA | | 001038609.2_ | | UAUUUGCACA | | 001038609.2_ | |
| | | | 1066-1086_ | | CUG | | 1064-1086_ | |
| | | | C21U_s | | | | G1A_as | |
| AD- | GUGCAAAUAGU | 1296 | NM_ | 1068-1088 | UGGCUUGUAG | 1344 | NM_ | 1066-1088 |
| 393761.1 | CUACAAGCCA | | 001038609.2_ | | ACUAUUUGCA | | 001038609.2_ | |
| | | | 1068-1088_ | | CAC | | 1066-1088_ | |
| | | | G21U_s | | | | C1A_as | |
| AD- | UCAGGUGAACC | 1297 | NM_ | 705-725 | UGAUUUUGGU | 1345 | NM_ | 703-725 |
| 393495.1 | ACCAAAAUCA | | 001038609.2_ | | GGUUCACCUG | | 001038609.2_ | |
| | | | 705-725_ | | ACC | | 703-725_ | |
| | | | C21U_s | | | | G1A_as | |
| AD- | UGUGCAAAUAG | 1298 | NM_ | 1067-1087 | UGCUUGUAGA | 1346 | NM_ | 1065-1087 |
| 393760.1 | UCUACAAGCA | | 001038609.2_ | | CUAUUUGCAC | | 001038609.2_ | |
| | | | 1067-1087_ | | ACU | | 1065-1087_ | |
| | | | C21U_s | | | | G1A_as | |
| AD- | UUUAUCAAUAG | 1299 | NM_ | 4520-4540 | UUAAAUGGAA | 1347 | NM_ | 4518-4540 |
| 396425.1 | UUCCAUUUAA | | 001038609.2_ | | CUAUUGAUAA | | 001038609.2_ | |
| | | | 4520-4540_s | | AGU | | 4518-4540_as | |
| AD- | ACCAGAGUGAC | 1300 | NM_ | 3341-3361 | UACUAUCAUA | 1348 | NM_ | 3339-3361 |
| 395441.1 | UAUGAUAGUA | | 001038609.2_ | | GUCACUCUGG | | 001038609.2_ | |
| | | | 3341-3361_ | | UGA | | 3339-3361_ | |
| | | | G21U_s | | | | C1A_as | |
| AD- | UUCACUUUAUC | 1301 | NM_ | 4515-4535 | UGGAACUAUU | 1349 | NM_ | 4513-4535 |
| 396420.1 | AAUAGUUCCA | | 001038609.2_ | | GAUAAAGUGA | | 001038609.2_ | |
| | | | 4515-4535_s | | AUU | | 4513-4535_as | |
| AD- | UGUGAAUGUCC | 1302 | NM_ | 5284-5304 | UACACUAUAU | 1350 | NM_ | 5282-5304 |
| 397103.1 | AUAUAGUGUA | | 001038609.2_ | | GGACAUUCAC | | 001038609.2_ | |
| | | | 5284-5304_s | | AGA | | 5282-5304_as | |
| AD- | GUGAAUGUCCA | 1303 | NM_ | 5285-5305 | UUACACUAUA | 1351 | NM_ | 5283-5305 |
| 397104.1 | UAUAGUGUAA | | 001038609.2_ | | UGGACAUUCA | | 001038609.2_ | |
| | | | 5285-5305_s | | CAG | | 5283-5305_as | |
| AD- | CGAUGCUAAGA | 1304 | NM_ | 344-364 | UUUGGAGUGC | 1352 | NM_ | 342-364 |
| 393239.1 | GCACUCCAAA | | 001038609.2_ | | UCUUAGCAUC | | 001038609.2_ | |
| | | | 344-364_ | | GGA | | 342-364_ | |
| | | | C21U_s | | | | G1A_as | |
| AD- | CUGUGAAUGUC | 1305 | NM_ | 5283-5303 | UCACUAUAUG | 1353 | NM_ | 5281-5303 |
| 397102.1 | CAUAUAGUGA | | 001038609.2_ | | GACAUUCACA | | 001038609.2_ | |
| | | | 5283-5303_s | | GAC | | 5281-5303_as | |
| AD- | UGGAAAUAAAG | 1306 | NM_ | 5354-5374 | UGAGUAAUAA | 1354 | NM_ | 5352-5374 |
| 397167.1 | UUAUUACUCA | | 001038609.2_ | | CUUUAUUUCC | | 001038609.2_ | |
| | | | 5354-5374_s | | AAA | | 5352-5374_as | |
| AD- | UGGGACUUUAG | 1307 | NM_ | 2459-2479 | UUGGUUAGCC | 1355 | NM_ | 2457-2479 |
| 394791.1 | GGCUAACCAA | | 001038609.2_ | | CUAAAGUCCC | | 001038609.2_ | |
| | | | 2459-2479_ | | AGG | | 2457-2479_ | |
| | | | G21U_s | | | | C1A_as | |
| AD- | AGGCAGUGUGC | 1308 | NM_ | 1061-1081 | UAGACUAUUU | 1356 | NM_ | 1059-1081 |
| 393754.1 | AAAUAGUCUA | | 001038609.2_ | | GCACACUGCC | | 001038609.2_ | |
| | | | 1061-1081_s | | UCC | | 1059-1081_as | |
| AD- | CAGGUGAACCA | 1309 | NM_ | 706-726 | UGGAUUUUGG | 1357 | NM_ | 704-726 |
| 393496.1 | CCAAAAUCCA | | 001038609.2_ | | UGGUUCACCU | | 001038609.2_ | |
| | | | 706-726_ | | GAC | | 704-726_ | |
| | | | G21U_s | | | | C1A_as | |
| AD- | AAGGUGCAGAU | 1310 | NM_ | 972-992 | UUUAUUAAUU | 1358 | NM_ | 970-992 |
| 393667.1 | AAUUAAUAAA | | 001038609.2_ | | AUCUGCACCU | | 001038609.2_ | |
| | | | 972-992_ | | UGC | | 970-992_ | |
| | | | G21U_s | | | | C1A_as | |
| AD- | AUCCCAUUUGA | 1311 | NM_ | 4564-4584 | UCAAGCAAUC | 1359 | NM_ | 4562-4584 |
| 396467.1 | GAUUGCUUGA | | 001038609.2_ | | UCAAAUGGGA | | 001038609.2_ | |
| | | | 4564-4584_ | | UAC | | 4562-4584_ | |
| | | | C21U_s | | | | G1A_as | |
| AD- | GCUGGAUCUUA | 1312 | NM_ | 995-1015 | UGGACGUUGC | 1360 | NM_ | 993-1015 |
| 393690.1 | GCAACGUCCA | | 001038609.2_ | | UAAGAUCCAG | | 001038609.2_ | |
| | | | 995-1015_s | | CUU | | 993-1015_as | |
| AD- | CUUCAAUGAUA | 1313 | NM_ | 4546-4566 | UAUACACUCU | 1361 | NM_ | 4544-4566 |
| 396449.1 | AGAGUGUAUA | | 001038609.2_ | | UAUCAUUGAA | | 001038609.2_ | |
| | | | 4546-4566_ | | GUC | | 4544-4566_ | |
| | | | C21U_s | | | | G1A_as | |
| AD- | UGGCAAGGUGC | 1314 | NM_ | 968-988 | UUAAUUAUCU | 1362 | NM_ | 966-988 |
| 393663.1 | AGAUAAUUAA | | 001038609.2_ | | GCACCUUGCC | | 001038609.2_ | |
| | | | 968-988_s | | ACC | | 966-988_as | |
| AD- | AGGGAACAUCC | 1315 | NM_ | 1127-1147 | UGCUUGUGAU | 1363 | NM_ | 1125-1147 |
| 393820.1 | AUCACAAGCA | | 001038609.2_ | | GGAUGUUCCC | | 001038609.2_ | |
| | | | 1127-1147_ | | UAA | | 1125-1147_ | |
| | | | C21U_s | | | | G1A_as | |
| AD- | CAUUUAAAUUG | 1316 | NM_ | 4534-4554 | UCAUUGAAGU | 1364 | NM_ | 4532-4554 |
| 396437.1 | ACUUCAAUGA | | 001038609.2_ | | CAAUUUAAAU | | 001038609.2_ | |
| | | | 4534-4554_s | | GGA | | 4532-4554_as | |
| AD- | UCUGUCGAUUA | 1317 | NM_ | 158-178 | UAAAGCCUGA | 1365 | NM_ | 156-178 |
| 393084.1 | UCAGGCUUUA | | 001038609.2_ | | UAAUCGACAG | | 001038609.2_ | |
| | | | 158-178_s | | AAG | | 156-178_as | |
| AD- | CUGGUUCCUCC | 1318 | NM_ | 4494-4514 | UUAAGAGCUU | 1366 | NM_ | 4492-4514 |
| 396401.1 | AAGCUCUUAA | | 001038609.2_ | | GGAGGAACCA | | 001038609.2_ | |
| | | | 4494-4514_s | | GGC | | 4492-4514_as | |
| AD- | CCAAAUUGAUU | 1319 | NM_ | 1691-1711 | UUAGCCCACA | 1367 | NM_ | 1689-1711 |
| 394296.1 | UGUGGGCUAA | | 001038609.2_ | | AAUCAAUUUG | | 001038609.2_ | |
| | | | 1691-1711_s | | GAA | | 1689-1711_as | |
| AD- | AUGUUUUGAAG | 1320 | NM_ | 3544-3564 | UGAAGAAACC | 1368 | NM_ | 3542-3564 |
| 395574.1 | GGUUUCUUCA | | 001038609.2_ | | CUUCAAAACA | | 001038609.2_ | |
| | | | 3544-3564_s | | UGG | | 3542-3564_as | |
| AD- | CGCCAGGAGUU | 1321 | NM_ | 198-218 | UAUUGUGUCA | 1369 | NM_ | 196-218 |
| 393124.1 | UGACACAAUA | | 001038609.2_ | | AACUCCUGGC | | 001038609.2_ | |
| | | | 198-218_ | | GAG | | 196-218_ | |
| | | | G21U_s | | | | C1A_as | |
| AD- | AGAUAAUUAAU | 1322 | NM_ | 979-999 | UCAGCUUCUU | 1370 | NM_ | 977-999 |
| 393674.1 | AAGAAGCUGA | | 001038609.2_ | | AUUAAUUAUC | | 001038609.2_ | |
| | | | 979-999_ | | UGC | | 977-999_ | |
| | | | G21U_s | | | | C1A_as | |
| AD- | UCAAUGAUAAG | 1323 | NM_ | 4548-4568 | UGGAUACACU | 1371 | NM_ | 4546-4568 |
| 396451.1 | AGUGUAUCCA | | 001038609.2_ | | CUUAUCAUUG | | 001038609.2_ | |
| | | | 4548-4568_ | | AAG | | 4546-4568_ | |
| | | | C21U_s | | | | G1A_as | |
| AD- | AUGAUAAGAGU | 1324 | NM_ | 4551-4571 | UAUGGGAUAC | 1372 | NM_ | 4549-4571 |
| 396454.1 | GUAUCCCAUA | | 001038609.2_ | | ACUCUUAUCA | | 001038609.2_ | |
| | | | 4551-4571_s | | UUG | | 4549-4571_as | |
| AD- | GACAGGACAGG | 1325 | NM_ | 543-563 | UUCGUCAUUU | 1373 | NM_ | 541-563 |
| 393376.1 | AAAUGACGAA | | 001038609.2_ | | CCUGUCCUGU | | 001038609.2_ | |
| | | | 543-563_ | | cuu | | 541-563_ | |
| | | | G21U_s | | | | C1A_as | |
| AD- | CACCAAAAUCC | 1326 | NM_ | 715-735 | UUCGUUCUCC | 1374 | NM_ | 713-735 |
| 393505.1 | GGAGAACGAA | | 001038609.2_ | | GGAUUUUGGU | | 001038609.2_ | |
| | | | 715-735_s | | GGU | | 713-735_as | |
| AD- | AGACAGGACAG | 1327 | NM_ | 542-562 | UCGUCAUUUC | 1375 | NM_ | 540-562 |
| 393375.1 | GAAAUGACGA | | 001038609.2_ | | CUGUCCUGUC | | 001038609.2_ | |
| | | | 542-562_s | | uuu | | 540-562_as | |
| AD- | AGAGCACUCCA | 1328 | NM_ | 352-372 | UUUCAGCAGU | 1376 | NM_ | 350-372 |
| 393247.1 | ACUGCUGAAA | | 001038609.2_ | | UGGAGUGCUC | | 001038609.2_ | |
| | | | 352-372_ | | UUA | | 350-372_ | |
| | | | G21U_s | | | | C1A_as | |
| AD- | AACUGCUGAAG | 1329 | NM_ | 362-382 | UCAGUCACGU | 1377 | NM_ | 360-382 |
| 393257.1 | ACGUGACUGA | | 001038609.2 | | CUUCAGCAGU | | 001038609.2_ | |
| | | | 362-382_ | | UGG | | 360-382_ | |
| | | | C21U_s | | | | G1A_as | |
| AD- | AAGAGUGUAUC | 1330 | NM_ | 4556-4576 | UCUCAAAUGG | 1378 | NM_ | 4554-4576 |
| 396459.1 | CCAUUUGAGA | | 001038609.2_ | | GAUACACUCU | | 001038609.2_ | |
| | | | 4556-4576_s | | UAU | | 4554-4576_as | |
| AD- | UUCAAUGAUAA | 1331 | NM_ | 4547-4567 | UGAUACACUC | 1379 | NM_ | 4545-4567 |
| 396450.1 | GAGUGUAUCA | | 001038609.2_ | | UUAUCAUUGA | | 001038609.2_ | |
| | | | 4547-4567_ | | AGU | | 4545-4567_ | |
| | | | C21U_s | | | | G1A_as | |
| AD- | UUGACUUCAAU | 1332 | NM_ | 4542-4562 | UACUCUUAUC | 1380 | NM_ | 4540-4562 |
| 396445.1 | GAUAAGAGUA | | 001038609.2_ | | AUUGAAGUCA | | 001038609.2_ | |
| | | | 4542-4562_ | | AUU | | 4540-4562_ | |
| | | | G21U_s | | | | C1A_as | |
| AD- | GAGUGUAUCCC | 1333 | NM_ | 4558-4578 | UAUCUCAAAU | 1381 | NM_ | 4556-4578 |
| 396461.1 | AUUUGAGAUA | | 001038609.2_ | | GGGAUACACU | | 001038609.2_ | |
| | | | 4558-4578_s | | CUU | | 4556-4578_as | |
| AD- | CAAUGAUAAGA | 1334 | NM_ | 4549-4569 | UGGGAUACAC | 1382 | NM_ | 4547-4569 |
| 396452.1 | GUGUAUCCCA | | 001038609.2_ | | UCUUAUCAUU | | 001038609.2_ | |
| | | | 4549-4569_s | | GAA | | 4547-4569_as | |
| AD- | AUCUGUGGCUU | 1335 | NM_ | 5074-5094 | UAGGCUCAUA | 1383 | NM_ | 5072-5094 |
| 396913.1 | UAUGAGCCUA | | 001038609.2_ | | AAGCCACAGA | | 001038609.2_ | |
| | | | 5074-5094_s | | UCU | | 5072-5094_as | |
| AD- | UGAUAAGAGUG | 1336 | NM_ | 4552-4572 | UAAUGGGAUA | 1384 | NM_ | 4550-4572 |
| 396455.1 | UAUCCCAUUA | | 001038609.2_ | | CACUCUUAUC | | 001038609.2_ | |
| | | | 4552-4572_s | | AUU | | 4550-4572_as | |
| AD- | GAUCUGUGGCU | 1337 | NM_ | 5073-5093 | UGGCUCAUAA | 1385 | NM_ | 5071-5093 |
| 396912.1 | UUAUGAGCCA | | 001038609.2_ | | AGCCACAGAU | | 001038609.2_ | |
| | | | 5073-5093_s | | CUA | | 5071-5093_as | |
| AD- | CUGUGGCUUUA | 1338 | NM_ | 5076-5096 | UGAAGGCUCA | 1386 | NM_ | 5074-5096 |
| 396915.1 | UGAGCCUUCA | | 001038609.2_ | | UAAAGCCACA | | 001038609.2_ | |
| | | | 5076-5096_s | | GAU | | 5074-5096_as | |
| AD- | AAUGAUAAGAG | 1339 | NM_ | 4550-4570 | UUGGGAUACA | 1387 | NM_ | 4548-4570 |
| 396453.1 | UGUAUCCCAA | | 001038609.2_ | | CUCUUAUCAU | | 001038609.2_ | |
| | | | 4550-4570_s | | UGA | | 4548-4570_as | |
| AD- | CAAUAUCUGCU | 1340 | NM_ | 2753-2773 | UCUAGUGUAG | 1388 | NM_ | 2751-2773 |
| 394991.1 | CUACACUAGA | | 001038609.2_ | | AGCAGAUAUU | | 001038609.2_ | |
| | | | 2753-2773_ | | GCC | | 2751-2773_ | |
| | | | G21U_s | | | | C1A_as | |

TABLE 13
Modified Sense and Antisense Strand Sequences of MAPT dsRNA Agents-Screen 4

| | | | | | mRNA Target | |
|---|---|---|---|---|---|---|
| | Sense Sequence | SEQ ID | Antisense Sequence | SEQ ID | Sequence | SEQ ID |
| Duplex ID | 5’ to 3’ | NO: | 5’ to 3’ | NO: | 5’ to 3’ | NO: |
| AD-393758.1 | asgsugugCfaAfAfU | 1389 | VPusUfsuguAfgAfCfu | 1437 | GCAGUGUGCAAAU | 1485 |
| | fagucuacaaaL96 | | auuUfgCfacacusgsc | | AGUCUACAAG | |
| AD-393888.1 | ascsagagUfcCfAfGf | 1390 | VPusAfsaucUfuCfGfac | 1438 | GGACAGAGUCCAG | 1486 |
| | ucgaagauuaL96 | | ugGfaCfucuguscsc | | UCGAAGAUUG | |
| AD-393759.1 | gsusgugcAfaAfUfA | 1391 | VPusCfsuugUfaGfAfcu | 1439 | CAGUGUGCAAAUA | 1487 |
| | fgucuacaagaL96 | | auUfuGfcacacsusg | | GUCUACAAGC | |
| AD-393761.1 | gsusgcaaAfuAfGfU | 1392 | VPusGfsgcuUfgUfAfg | 1440 | GUGUGCAAAUAGU | 1488 |
| | fcuacaagccaL96 | | acuAfuUfugcacsasc | | CUACAAGCCG | |
| AD-393495.1 | uscsagguGfaAfCfCf | 1393 | VPusGfsauuUfuGfGfu | 1441 | GGUCAGGUGAACC | 1489 |
| | accaaaaucaL96 | | gguUfcAfccugascsc | | ACCAAAAUCC | |
| AD-393760.1 | usgsugcaAfaUfAfG | 1394 | VPusGfscuuGfuAfGfac | 1442 | AGUGUGCAAAUAG | 1490 |
| | fucuacaagcaL96 | | uaUfuUfgcacascsu | | UCUACAAGCC | |
| AD-396425.1 | ususuaucAfaUfAfG | 1395 | VPusUfsaaaUfgGfAfac | 1443 | ACUUUAUCAAUAG | 1491 |
| | fuuccauuuaaL96 | | uaUfuGfauaaasgsu | | UUCCAUUUAA | |
| AD-395441.1 | ascscagaGfuGfAfCf | 1396 | VPusAfscuaUfcAfUfag | 1444 | UCACCAGAGUGAC | 1492 |
| | uaugauaguaL96 | | ucAfcUfcuggusgsa | | UAUGAUAGUG | |
| AD-396420.1 | ususcacuUfuAfUfCf | 1397 | VPusGfsgaaCfuAfUfug | 1445 | AAUUCACUUUAUC | 1493 |
| | aauaguuccaL96 | | auAfaAfgugaasusu | | AAUAGUUCCA | |
| AD-397103.1 | usgsugaaUfgUfCfCf | 1398 | VPusAfscacUfaUfAfug | 1446 | UCUGUGAAUGUCC | 1494 |
| | auauaguguaL96 | | gaCfaUfucacasgsa | | AUAUAGUGUA | |
| AD-397104.1 | gsusgaauGfuCfCfAf | 1399 | VPusUfsacaCfuAfUfan | 1447 | CUGUGAAUGUCCA | 1495 |
| | uauaguguaaL96 | | ggAfcAfuucacsasg | | UAUAGUGUAU | |
| AD-393239.1 | csgsaugcUfaAfGfAf | 1400 | VPusUfsuggAfgUfGfc | 1448 | UCCGAUGCUAAGA | 1496 |
| | gcacuccaaaL96 | | ucuUfaGfcaucgsgsa | | GCACUCCAAC | |
| AD-397102.1 | csusgugaAfuGfUfC | 1401 | VPusCfsacuAfuAfUfgg | 1449 | GUCUGUGAAUGUC | 1497 |
| | fcauauagugaL96 | | acAfuUfcacagsasc | | CAUAUAGUGU | |
| AD-397167.1 | usgsgaaaUfaAfAfGf | 1402 | VPusGfsaguAfaUfAfac | 1450 | UUUGGAAAUAAAG | 1498 |
| | uuauuacucaL96 | | uuUfaUfuuccasasa | | UUAUUACUCU | |
| AD-394791.1 | usgsggacUfuUfAfG | 1403 | VPusUfsgguUfaGfCfcc | 1451 | CCUGGGACUUUAG | 1499 |
| | fggcuaaccaaL96 | | uaAfaGfucccasgsg | | GGCUAACCAG | |
| AD-393754.1 | asgsgcagUfgUfGfCf | 1404 | VPusAfsgacUfaUfUfug | 1452 | GGAGGCAGUGUGC | 1500 |
| | aaauagucuaL96 | | caCfaCfugccuscsc | | AAAUAGUCUA | |
| AD-393496.1 | csasggugAfaCfCfAf | 1405 | VPusGfsgauUfuUfGfg | 1453 | GUCAGGUGAACCA | 1501 |
| | ccaaaauccaL96 | | uggUfuCfaccugsasc | | CCAAAAUCCG | |
| AD-393667.1 | asasggugCfaGfAfUf | 1406 | VPusUfsuauUfaAfUfua | 1454 | GCAAGGUGCAGAU | 1502 |
| | aauuaauaaaL96 | | ucUfgCfaccuusgsc | | AAUUAAUAAG | |
| AD-396467.1 | asuscccaUfuUfGfAf | 1407 | VPusCfsaagCfaAfUfcu | 1455 | GUAUCCCAUUUGA | 1503 |
| | gauugcuugaL96 | | caAfaUfgggausasc | | GAUUGCUUGC | |
| AD-393690.1 | gscsuggaUfcUfUfA | 1408 | VPusGfsgacGfuUfGfcu | 1456 | AAGCUGGAUCUUA | 1504 |
| | fgcaacguccaL96 | | aaGfaUfccagcsusu | | GCAACGUCCA | |
| AD-396449.1 | csusucaaUfgAfUfAf | 1409 | VPusAfsuacAfcUfCfuu | 1457 | GACUUCAAUGAUA | 1505 |
| | agaguguauaL96 | | auCfaUfugaagsusc | | AGAGUGUAUC | |
| AD-393663.1 | usgsgcaaGfgUfGfCf | 1410 | VPusUfsaauUfaUfCfug | 1458 | GGUGGCAAGGUGC | 1506 |
| | agauaauuaaL96 | | caCfcUfugccascsc | | AGAUAAUUAA | |
| AD-393820.1 | asgsggaaCfaUfCfCf | 1411 | VPusGfscuuGfuGfAfu | 1459 | UUAGGGAACAUCC | 1507 |
| | aucacaagcaL96 | | ggaUfgUfucccusasa | | AUCACAAGCC | |
| AD-396437.1 | csasuuuaAfaUfUfGf | 1412 | VPusCfsauuGfaAfGfuc | 1460 | UCCAUUUAAAUUG | 1508 |
| | acuucaaugaL96 | | aaUfuUfaaaugsgsa | | ACUUCAAUGA | |
| AD-393084.1 | uscsugucGfaUfUfA | 1413 | VPusAfsaagCfcUfGfau | 1461 | CUUCUGUCGAUUA | 1509 |
| | fucaggcuuuaL96 | | aaUfcGfacagasasg | | UCAGGCUUUG | |
| AD-396401.1 | csusgguuCfcUfCfCf | 1414 | VPusUfsaagAfgCfUfug | 1462 | GCCUGGUUCCUCC | 1510 |
| | aagcucuuaaL96 | | gaGfgAfaccagsgsc | | AAGCUCUUAA | |
| AD-394296.1 | cscsaaauUfgAfUfUf | 1415 | VPusUfsagcCfcAfCfaa | 1463 | UUCCAAAUUGAUU | 1511 |
| | ugugggcuaaL96 | | auCfaAfuuuggsasa | | UGUGGGCUAA | |
| AD-395574.1 | asusguuuUfgAfAfG | 1416 | VPusGfsaagAfaAfCfcc | 1464 | CCAUGUUUUGAAG | 1512 |
| | fgguuucuucaL96 | | uuCfaAfaacausgsg | | GGUUUCUUCU | |
| AD-393124.1 | csgsccagGfaGfUfUf | 1417 | VPusAfsuugUfgUfCfaa | 1465 | CUCGCCAGGAGUU | 1513 |
| | ugacacaauaL96 | | acUfcCfuggcgsasg | | UGACACAAUG | |
| AD-393674.1 | asgsauaaUfuAfAfUf | 1418 | VPusCfsagcUfuCfUfua | 1466 | GCAGAUAAUUAAU | 1514 |
| | aagaagcugaL96 | | uuAfaUfuaucusgsc | | AAGAAGCUGG | |
| AD-396451.1 | uscsaaugAfuAfAfG | 1419 | VPusGfsgauAfcAfCfuc | 1467 | CUUCAAUGAUAAG | 1515 |
| | faguguauccaL96 | | uuAfuCfauugasasg | | AGUGUAUCCC | |
| AD-396454.1 | asusgauaAfgAfGfU | 1420 | VPusAfsuggGfaUfAfca | 1468 | CAAUGAUAAGAGU | 1516 |
| | fguaucccauaL96 | | cuCfuUfaucaususg | | GUAUCCCAUU | |
| AD-393376.1 | gsascaggAfcAfGfGf | 1421 | VPusUfscguCfaUfUfuc | 1469 | AAGACAGGACAGG | 1517 |
| | aaaugacgaaL96 | | cuGfuCfcugucsusu | | AAAUGACGAG | |
| AD-393505.1 | csasccaaAfaUfCfCf | 1422 | VPusUfscguUfcUfCfcg | 1470 | ACCACCAAAAUCC | 1518 |
| | ggagaacgaaL96 | | gaUfuUfuggugsgsu | | GGAGAACGAA | |
| AD-393375.1 | asgsacagGfaCfAfGf | 1423 | VPusCfsgucAfuUfUfcc | 1471 | AAAGACAGGACAG | 1519 |
| | gaaaugacgaL96 | | ugUfcCfugucususu | | GAAAUGACGA | |
| AD-393247.1 | asgsagcaCfuCfCAf | 1424 | VPusUfsucaGfcAfGfuu | 1472 | UAAGAGCACUCCA | 1520 |
| | acugcugaaaL96 | | ggAfgUfgcucususa | | ACUGCUGAAG | |
| AD-393257.1 | asascugcUfgAfAfGf | 1425 | VPusCfsaguCfaCfGfuc | 1473 | CCAACUGCUGAAG | 1521 |
| | acgugacugaL96 | | uuCfaGfcaguusgsg | | ACGUGACUGC | |
| AD-396459.1 | asasgaguGfuAfUfCf | 1426 | VPusCfsucaAfaUfGfgg | 1474 | AUAAGAGUGUAUC | 1522 |
| | ccauuugagaL96 | | auAfcAfcucuusasu | | CCAUUUGAGA | |
| AD-396450.1 | ususcaauGfaUfAfAf | 1427 | VPusGfsauaCfaCfUfcu | 1475 | ACUUCAAUGAUAA | 1523 |
| | gaguguaucaL96 | | uaUfcAfuugaasgsu | | GAGUGUAUCC | |
| AD-396445.1 | ususgacuUfcAfAfU | 1428 | VPusAfscucUfuAfUfca | 1476 | AAUUGACUUCAAU | 1524 |
| | fgauaagaguaL96 | | uuGfaAfgucaasusu | | GAUAAGAGUG | |
| AD-396461.1 | gsasguguAfuCfCfCf | 1429 | VPusAfsucuCfaAfAfug | 1477 | AAGAGUGUAUCCC | 1525 |
| | auuugagauaL96 | | ggAfuAfcacucsusu | | AUUUGAGAUU | |
| AD-396452.1 | csasaugaUfaAfGfAf | 1430 | VPusGfsggaUfaCfAfcu | 1478 | UUCAAUGAUAAGA | 1526 |
| | guguaucccaL96 | | cuUfaUfcauugsasa | | GUGUAUCCCA | |
| AD-396913.1 | asuscuguGfgCfUfU | 1431 | VPusAfsggcUfcAfUfaa | 1479 | AGAUCUGUGGCUU | 1527 |
| | fuaugagccuaL96 | | agCfcAfcagauscsu | | UAUGAGCCUU | |
| AD-396455.1 | usgsauaaGfaGfUfGf | 1432 | VPusAfsaugGfgAfUfac | 1480 | AAUGAUAAGAGUG | 1528 |
| | uaucccauuaL96 | | acUfcUfuaucasusu | | UAUCCCAUUU | |
| AD-396912.1 | gsasucugUfgGfCfU | 1433 | VPusGfsgcuCfaUfAfaa | 1481 | UAGAUCUGUGGCU | 1529 |
| | fuuaugagccaL96 | | gcCfaCfagaucsusa | | UUAUGAGCCU | |
| AD-396915.1 | csusguggCfuUfUfA | 1434 | VPusGfsaagGfcUfCfau | 1482 | AUCUGUGGCUUUA | 1530 |
| | fugagccuucaL96 | | aaAfgCfcacagsasu | | UGAGCCUUCA | |
| AD-396453.1 | asasugauAfaGfAfGf | 1435 | VPusUfsgggAfuAfCfac | 1483 | UCAAUGAUAAGAG | 1531 |
| | uguaucccaaL96 | | ucUfuAfucauusgsa | | UGUAUCCCAU | |
| AD-394991.1 | csasauauCfuGfCfUf | 1436 | VPusCfsuagUfgUfAfga | 1484 | GGCAAUAUCUGCU | 1532 |
| | cuacacuagaL96 | | gcAfgAfuauugscsc | | CUACACUAGG | |

TABLE 14
MAPT Single Dose Screens in BE(2)C (human) Cells-Screen 4

| | 10 nM Dose | | 0.1 nM Dose | |
|---|---|---|---|---|
| | Avg % MAPT | | Avg % MAPT | |
| Duplex | mRNA Remaining | SD | mRNA Remaining | SD |
| AD-393758.1 | 4.4 | 1.1 | 41.8 | 7.3 |
| AD-393888.1 | 6.8 | 0.4 | 50.8 | 4.0 |
| AD-393759.1 | 8.0 | 1.0 | 43.5 | 6.4 |
| AD-393761.1 | 14.0 | 2.0 | 72.3 | 13.3 |
| AD-393495.1 | 14.0 | 1.7 | 33.5 | 7.0 |
| AD-393760.1 | 19.0 | 2.1 | 67.3 | 3.6 |
| AD-396425.1 | 24.9 | 4.2 | 40.9 | 7.1 |
| AD-395441.1 | 26.3 | 6.9 | 39.2 | 7.5 |
| AD-396420.1 | 30.5 | 6.3 | 41.5 | 7.2 |
| AD-397103.1 | 40.9 | 6.4 | 55.8 | 7.4 |
| AD-397104.1 | 41.8 | 8.9 | 62.1 | 4.6 |
| AD-393239.1 | 42.5 | 7.2 | 74.1 | 5.9 |
| AD-397102.1 | 44.8 | 4.6 | 59.6 | 4.8 |
| AD-397167.1 | 45.9 | 12.3 | 53.6 | 5.2 |
| AD-394791.1 | 47.4 | 10.1 | 78.5 | 4.3 |
| AD-393754.1 | 50.7 | 3.3 | 81.5 | 20.2 |
| AD-393496.1 | 51.5 | 4.4 | 85.4 | 10.1 |
| AD-393667.1 | 54.1 | 12.4 | 78.0 | 6.5 |
| AD-396467.1 | 58.0 | 9.1 | 90.8 | 7.3 |
| AD-393690.1 | 58.3 | 3.2 | 78.3 | 13.8 |
| AD-396449.1 | 60.0 | 10.9 | 82.7 | 11.5 |
| AD-393663.1 | 61.0 | 12.9 | 76.1 | 9.5 |
| AD-393820.1 | 61.2 | 10.3 | 93.5 | 11.4 |
| AD-396437.1 | 64.3 | 7.0 | 80.5 | 9.7 |
| AD-393084.1 | 68.9 | 9.0 | 92.4 | 4.9 |
| AD-396401.1 | 70.8 | 7.2 | 94.3 | 3.6 |
| AD-394296.1 | 77.3 | 5.0 | 93.7 | 7.5 |
| AD-395574.1 | 77.7 | 11.0 | 80.0 | 6.3 |
| AD-393124.1 | 78.7 | 18.8 | 97.3 | 3.1 |
| AD-393674.1 | 79.4 | 15.1 | 82.3 | 11.7 |
| AD-396451.1 | 79.8 | 11.9 | 102.6 | 7.8 |
| AD-396454.1 | 87.3 | 4.4 | 99.4 | 5.4 |
| AD-393376.1 | 88.4 | 14.9 | 106.2 | 17.8 |
| AD-393505.1 | 91.4 | 0.9 | 105.9 | 13.2 |
| AD-393375.1 | 92.2 | 14.6 | 98.6 | 7.8 |
| AD-393247.1 | 94.4 | 14.8 | 103.4 | 4.0 |
| AD-393257.1 | 96.2 | 9.4 | 101.5 | 6.0 |
| AD-396459.1 | 96.4 | 9.3 | 104.6 | 6.7 |
| AD-396450.1 | 97.5 | 13.8 | 99.5 | 4.6 |
| AD-396445.1 | 98.6 | 10.3 | 97.9 | 8.8 |
| AD-396461.1 | 102.7 | 15.3 | 105.9 | 2.4 |
| AD-396452.1 | 104.4 | 8.2 | 99.4 | 5.6 |
| AD-396913.1 | 105.9 | 10.8 | 91.7 | 4.1 |
| AD-396455.1 | 106.3 | 4.4 | 100.2 | 5.5 |
| AD-396912.1 | 108.0 | 13.8 | 95.6 | 6.8 |
| AD-396915.1 | 110.6 | 11.4 | 98.6 | 0.8 |
| AD-396453.1 | 113.6 | 20.1 | 101.5 | 6.3 |
| AD-394991.1 | 115.6 | 6.5 | 101.7 | 9.5 |

TABLE 15
MAPT Single Dose Screens in NEuro2a (mouse) Cells-Screen 4

| | 10 nM Dose | | 0.1 nM Dose | |
|---|---|---|---|---|
| | Avg % MAPT | | Avg % MAPT | |
| Duplex | mRNA Remaining | SD | mRNA Remaining | SD |
| AD-393758.1 | 13.0 | 1.9 | 83.3 | 33.8 |
| AD-393888.1 | 18.2 | 1.8 | 85.7 | 14.5 |
| AD-393759.1 | 14.0 | 3.5 | 71.5 | 13.1 |
| AD-393761.1 | 20.3 | 1.9 | 74.0 | 13.5 |
| AD-393495.1 | 17.6 | 3.2 | 77.0 | 11.7 |
| AD-393760.1 | 21.3 | 4.1 | 89.0 | 10.8 |
| AD-396425.1 | 9.4 | 0.9 | 34.3 | 8.1 |
| AD-395441.1 | 13.7 | 3.8 | 34.1 | 4.4 |
| AD-396420.1 | 16.5 | 2.5 | 38.7 | 7.6 |
| AD-397103.1 | 25.0 | 3.6 | 50.5 | 15.8 |
| AD-397104.1 | 17.7 | 4.3 | 49.6 | 9.1 |
| AD-393239.1 | 40.3 | 10.7 | 96.4 | 15.0 |
| AD-397102.1 | 20.3 | 3.4 | 56.6 | 7.7 |
| AD-397167.1 | 26.8 | 2.8 | 49.6 | 11.2 |
| AD-394791.1 | 48.0 | 6.0 | 103.5 | 21.6 |
| AD-393754.1 | 32.9 | 4.5 | 86.0 | 23.0 |
| AD-393496.1 | 13.9 | 3.7 | 59.5 | 10.5 |
| AD-393667.1 | 14.7 | 2.5 | 85.0 | 18.5 |
| AD-396467.1 | 17.5 | 3.9 | 54.5 | 12.9 |
| AD-393690.1 | 58.6 | 15.7 | 114.5 | 31.9 |
| AD-396449.1 | 16.9 | 2.0 | 51.3 | 16.8 |
| AD-393663.1 | 21.9 | 6.2 | 88.8 | 20.0 |
| AD-393820.1 | 31.6 | 3.0 | 96.0 | 23.0 |
| AD-396437.1 | 34.0 | 4.2 | 93.0 | 9.3 |
| AD-393084.1 | 10.6 | 1.5 | 49.0 | 16.7 |
| AD-396401.1 | 29.2 | 1.7 | 78.9 | 16.3 |
| AD-394296.1 | 19.2 | 3.1 | 78.3 | 17.2 |
| AD-395574.1 | 22.0 | 2.4 | 65.4 | 21.1 |
| AD-393124.1 | 13.7 | 3.4 | 45.9 | 8.3 |
| AD-393674.1 | 38.1 | 13.3 | 109.3 | 28.4 |
| AD-396451.1 | 33.1 | 4.5 | 72.5 | 5.9 |
| AD-396454.1 | 25.9 | 4.4 | 52.2 | 18.0 |
| AD-393376.1 | 24.6 | 6.6 | 95.6 | 21.9 |
| AD-393505.1 | 23.8 | 1.5 | 86.4 | 16.8 |
| AD-393375.1 | 13.8 | 0.6 | 74.5 | 14.4 |
| AD-393247.1 | 40.5 | 3.8 | 93.2 | 18.7 |
| AD-393257.1 | 65.3 | 5.3 | 93.0 | 18.7 |
| AD-396459.1 | 17.9 | 1.4 | 50.9 | 5.6 |
| AD-396450.1 | 18.4 | 1.1 | 44.0 | 8.4 |
| AD-396445.1 | 28.4 | 3.7 | 71.9 | 22.4 |
| AD-396461.1 | 18.8 | 2.1 | 56.7 | 16.7 |
| AD-396452.1 | 14.8 | 1.0 | 50.1 | 13.0 |
| AD-396913.1 | 28.4 | 3.6 | 92.6 | 14.1 |
| AD-396455.1 | 33.3 | 6.4 | 91.5 | 29.3 |
| AD-396912.1 | 37.9 | 2.4 | 96.0 | 10.0 |
| AD-396915.1 | 31.6 | 4.8 | 108.7 | 28.2 |
| AD-396453.1 | 17.5 | 1.5 | 49.1 | 9.6 |
| AD-394991.1 | 45.0 | 5.7 | 113.4 | 17.1 |

TABLE 16
Unmodified Sense and Antisense Strand Sequences of MAPT dsRNA Agents-Screen 5

| Duplex | Sense Sequence | SEQ ID | Range in | Antisense Sequence | SEQ ID | Range in |
|---|---|---|---|---|---|---|
| Name | 5’ to 3’ | NO: | NM_005910.6 | 5’ to 3’ | NO: | NM_005910.6 |
| AD- | ACGUGACCCAAGCU | 1538 | 512-532 | UCAUGCGAGCUTGG | 1627 | 510-532 |
| 1397070.1 | CGCAUGA | | | GUCACGUGA | | |
| AD- | CGUGACCCAAGCUC | 1539 | 513-533 | UCCATGCGAGCUUG | 1628 | 511-533 |
| 1397071.1 | GCAUGGA | | | GGUCACGUG | | |
| AD- | GUGACCCAAGCUCG | 1540 | 514-534 | UACCAUGCGAGCU | 1629 | 512-534 |
| 1397072.1 | CAUGGUA | | | UGGGUCACGU | | |
| AD- | UGACCCAAGCUCGC | 1541 | 515-535 | UGACCATGCGAGCU | 1630 | 513-535 |
| 1397073.1 | AUGGUCA | | | UGGGUCACG | | |
| AD- | GACCCAAGCUCGCA | 1542 | 516-536 | UUGACCAUGCGAG | 1631 | 514-536 |
| 1397074.1 | UGGUCAA | | | CUUGGGUCAC | | |
| AD- | ACCCAAGCUCGCAU | 1543 | 517-537 | UCUGACCAUGCGA | 1632 | 515-537 |
| 1397075.1 | GGUCAGA | | | GCUUGGGUCA | | |
| AD- | CCCAAGCUCGCAUG | 1544 | 518-538 | UACUGACCAUGCG | 1633 | 516-538 |
| 1397076.1 | GUCAGUA | | | AGCUUGGGUC | | |
| AD- | CCAAGCUCGCAUGG | 1545 | 519-539 | UUACTGACCAUGCG | 1634 | 517-539 |
| 1397077.1 | UCAGUAA | | | AGCUUGGGU | | |
| AD- | CAAGCUCGCAUGGU | 1546 | 520-540 | UUUACUGACCAUG | 1635 | 518-540 |
| 1397078.1 | CAGUAAA | | | CGAGCUUGGG | | |
| AD- | AGUGUGCAAAUAGU | 1547 | 1063-1083 | UUUGTAGACUAUU | 1636 | 1061-1083 |
| 1397079.1 | CUACAAA | | | UGCACACUGC | | |
| AD- | UGCAAAUAGUCUAC | 1548 | 1067-1087 | UUGGTUTGUAGACU | 1637 | 1065-1087 |
| 1397080.1 | AAACCAA | | | AUUUGCACA | | |
| AD- | AUAGUCUACAAACC | 1549 | 1072-1092 | UUCAACTGGUUUG | 1638 | 1070-1092 |
| 1397081.1 | AGUUGAA | | | UAGACUAUUU | | |
| AD- | AGUCUACAAACCAG | 1550 | 1074-1094 | UGGUCAACUGGUU | 1639 | 1072-1094 |
| 1397082.1 | UUGACCA | | | UGUAGACUAU | | |
| AD- | GUCUACAAACCAGU | 1551 | 1075-1095 | UAGGTCAACUGGU | 1640 | 1073-1095 |
| 1397083.1 | UGACCUA | | | UUGUAGACUA | | |
| AD- | AGGCAACAUCCAUC | 1552 | 1125-1145 | UGUUTATGAUGGA | 1641 | 1123-1145 |
| 1397084.1 | AUAAACA | | | UGUUGCCUAA | | |
| AD- | GGCAACAUCCAUCA | 1553 | 1126-1146 | UGGUTUAUGAUGG | 1642 | 1124-1146 |
| 1397085.1 | UAAACCA | | | AUGUUGCCUA | | |
| AD- | GCAACAUCCAUCAU | 1554 | 1127-1147 | UUGGTUTAUGAUG | 1643 | 1125-1147 |
| 1397086.1 | AAACCAA | | | GAUGUUGCCU | | |
| AD- | AACAUCCAUCAUAA | 1555 | 1129-1149 | UCCUGGTUUAUGA | 1644 | 1127-1149 |
| 1397087.1 | ACCAGGA | | | UGGAUGUUGC | | |
| AD- | AUCUGAGAAGCUUG | 1556 | 1170-1190 | UUGAAGTCAAGCU | 1645 | 1168-1190 |
| 1397088.1 | ACUUCAA | | | UCUCAGAUUU | | |
| AD- | CAGCAUCGACAUGG | 1557 | 1395-1415 | UAGUCUACCAUGU | 1646 | 1393-1415 |
| 1397089.1 | UAGACUA | | | CGAUGCUGCC | | |
| AD- | UGGCAGCAACAAAG | 1558 | 1905-1925 | UCAAAUCCUUUGU | 1647 | 1903-1925 |
| 1397090.1 | GAUUUGA | | | UGCUGCCACU | | |
| AD- | GGCAGCAACAAAGG | 1559 | 1906-1926 | UTCAAATCCUUTGU | 1648 | 1904-1926 |
| 1397091.1 | AUUUGAA | | | UGCUGCCAC | | |
| AD- | AGCAACAAAGGAUU | 1560 | 1909-1929 | UGUUTCAAAUCCUU | 1649 | 1907-1929 |
| 1397092.1 | UGAAACA | | | UGUUGCUGC | | |
| AD- | CAACAAAGGAUUUG | 1561 | 1911-1931 | UAAGTUTCAAAUCC | 1650 | 1909-1931 |
| 1397093.1 | AAACUUA | | | UUUGUUGCU | | |
| AD- | AACAAAGGAUUUGA | 1562 | 1912-1932 | UCAAGUTUCAAAUC | 1651 | 1910-1932 |
| 1397094.1 | AACUUGA | | | CUUUGUUGC | | |
| AD- | ACAAAGGAUUUGAA | 1563 | 1913-1933 | UCCAAGTUUCAAAU | 1652 | 1911-1933 |
| 1397095.1 | ACUUGGA | | | CCUUUGUUG | | |
| AD- | CAAAGGAUUUGAAA | 1564 | 1914-1934 | UACCAAGUUUCAA | 1653 | 1912-1934 |
| 1397096.1 | CUUGGUA | | | AUCCUUUGUU | | |
| AD- | AAAGGAUUUGAAAC | 1565 | 1915-1935 | UCACCAAGUUUCA | 1654 | 1913-1935 |
| 1397097.1 | UUGGUGA | | | AAUCCUUUGU | | |
| AD- | AAGGAUUUGAAACU | 1566 | 1916-1936 | UACACCAAGUUTCA | 1655 | 1914-1936 |
| 1397098.1 | UGGUGUA | | | AAUCCUUUG | | |
| AD- | GAUUUGAAACUUGG | 1567 | 1919-1939 | UAACACACCAAGU | 1656 | 1917-1939 |
| 1397099.1 | UGUGUUA | | | UUCAAAUCCU | | |
| AD- | GGCAGACGAUGUCA | 1568 | 1951-1971 | UCAAGGTUGACAUC | 1657 | 1949-1971 |
| 1397101.1 | ACCUUGA | | | GUCUGCCUG | | |
| AD- | AGACGAUGUCAACC | 1569 | 1954-1974 | UACACAAGGUUGA | 1658 | 1952-1974 |
| 1397102.1 | UUGUGUA | | | CAUCGUCUGC | | |
| AD- | GAUGUCAACCUUGU | 1570 | 1958-1978 | UACUCACACAAGG | 1659 | 1956-1978 |
| 1397103.1 | GUGAGUA | | | UUGACAUCGU | | |
| AD- | GCUCCACAGAAACC | 1571 | 2387-2407 | UAAACAGGGUUUC | 1660 | 2385-2407 |
| 1397104.1 | CUGUUUA | | | UGUGGAGCAG | | |
| AD- | UUGAGUUCUGAAGG | 1572 | 2409-2429 | UUUCCAACCUUCAG | 1661 | 2407-2429 |
| 1397105.1 | UUGGAAA | | | AACUCAAUA | | |
| AD- | UGAGUUCUGAAGGU | 1573 | 2410-2430 | UGUUCCAACCUUCA | 1662 | 2408-2430 |
| 1397106.1 | UGGAACA | | | GAACUCAAU | | |
| AD- | UAGGGCUAACCAGU | 1574 | 2469-2489 | UAAGAGAACUGGU | 1663 | 2467-2489 |
| 1397107.1 | UCUCUUA | | | UAGCCCUAAA | | |
| AD- | GGGCUAACCAGUUC | 1575 | 2471-2491 | UCAAAGAGAACTG | 1664 | 2469-2491 |
| 1397108.1 | UCUUUGA | | | GUUAGCCCUA | | |
| AD- | GGCUAACCAGUUCU | 1576 | 2472-2492 | UACAAAGAGAACU | 1665 | 2470-2492 |
| 1397109.1 | CUUUGUA | | | GGUUAGCCCU | | |
| AD- | AACCAGUUCUCUUU | 1577 | 2476-2496 | UCCUTACAAAGAGA | 1666 | 2474-2496 |
| 1397110.1 | GUAAGGA | | | ACUGGUUAG | | |
| AD- | ACCAGUUCUCUUUG | 1578 | 2477-2497 | UUCCTUACAAAGAG | 1667 | 2475-2497 |
| 1397111.1 | UAAGGAA | | | AACUGGUUA | | |
| AD- | CCAGUUCUCUUUGU | 1579 | 2478-2498 | UGUCCUTACAAAGA | 1668 | 2476-2498 |
| 1397112.1 | AAGGACA | | | GAACUGGUU | | |
| AD- | AGUUCUCUUUGUAA | 1580 | 2480-2500 | UAAGTCCUUACAAA | 1669 | 2478-2500 |
| 1397113.1 | GGACUUA | | | GAGAACUGG | | |
| AD- | GUUCUCUUUGUAAG | 1581 | 2481-2501 | UCAAGUCCUUACA | 1670 | 2479-2501 |
| 1397114.1 | GACUUGA | | | AAGAGAACUG | | |
| AD- | UUCUCUUUGUAAGG | 1582 | 2482-2502 | UACAAGTCCUUACA | 1671 | 2480-2502 |
| 1397115.1 | ACUUGUA | | | AAGAGAACU | | |
| AD- | CUCUUUGUAAGGAC | 1583 | 2484-2504 | UGCACAAGUCCTUA | 1672 | 2482-2504 |
| 1397116.1 | UUGUGCA | | | CAAAGAGAA | | |
| AD- | CCAUACUGAGGGUG | 1584 | 2762-2782 | UUAATUTCACCCUC | 1673 | 2760-2782 |
| 1397117.1 | AAAUUAA | | | AGUAUGGAG | | |
| AD- | AUACUGAGGGUGAA | 1585 | 2764-2784 | UCUUAATUUCACCC | 1674 | 2762-2784 |
| 1397118.1 | AUUAAGA | | | UCAGUAUGG | | |
| AD- | ACUGAGGGUGAAAU | 1586 | 2766-2786 | UCCCTUAAUUUCAC | 1675 | 2764-2786 |
| 1397119.1 | UAAGGGA | | | CCUCAGUAU | | |
| AD- | CUGAGGGUGAAAUU | 1587 | 2767-2787 | UTCCCUTAAUUTCA | 1676 | 2765-2787 |
| 1397120.1 | AAGGGAA | | | CCCUCAGUA | | |
| AD- | UGAGGGUGAAAUUA | 1588 | 2768-2788 | UUUCCCTUAAUUUC | 1677 | 2766-2788 |
| 1397121.1 | AGGGAAA | | | ACCCUCAGU | | |
| AD- | GAGGGUGAAAUUAA | 1589 | 2769-2789 | UCUUCCCUUAAUU | 1678 | 2767-2789 |
| 1397122.1 | GGGAAGA | | | UCACCCUCAG | | |
| AD- | GCCUCUCACUCUCA | 1590 | 2819-2839 | UUGGAACUGAGAG | 1679 | 2817-2839 |
| 1397123.1 | GUUCCAA | | | UGAGAGGCUG | | |
| AD- | CUCUCACUCUCAGU | 1591 | 2821-2841 | UAGUGGAACUGAG | 1680 | 2819-2841 |
| 1397124.1 | UCCACUA | | | AGUGAGAGGC | | |
| AD- | UCUCAGUUCCACUC | 1592 | 2828-2848 | UUUGGATGAGUGG | 1681 | 2826-2848 |
| 1397125.1 | AUCCAAA | | | AACUGAGAGU | | |
| AD- | UAGGUGUUUCUGCC | 1593 | 2943-2963 | UCAACAAGGCAGA | 1682 | 2941-2963 |
| 1397126.1 | UUGUUGA | | | AACACCUAGG | | |
| AD- | AGGUGUUUCUGCCU | 1594 | 2944-2964 | UTCAACAAGGCAGA | 1683 | 2942-2964 |
| 1397127.1 | UGUUGAA | | | AACACCUAG | | |
| AD- | GUGUUUCUGCCUUG | 1595 | 2946-2966 | UUGUCAACAAGGC | 1684 | 2944-2966 |
| 1397128.1 | UUGACAA | | | AGAAACACCU | | |
| AD- | UGUUUCUGCCUUGU | 1596 | 2947-2967 | UAUGTCAACAAGGC | 1685 | 2945-2967 |
| 1397129.1 | UGACAUA | | | AGAAACACC | | |
| AD- | GAAGCCAUGCUGUC | 1597 | 3252-3272 | UAGAACAGACAGC | 1686 | 3250-3272 |
| 1397130.1 | UGUUCUA | | | AUGGCUUCCA | | |
| AD- | AGCAGCUGAACAUA | 1598 | 3277-3297 | UUAUGUAUAUGUU | 1687 | 3275-3297 |
| 1397131.1 | UACAUAA | | | CAGCUGCUCC | | |
| AD- | AGCUGAACAUAUAC | 1599 | 3280-3300 | UAUCTATGUAUAUG | 1688 | 3278-3300 |
| 1397132.1 | AUAGAUA | | | UUCAGCUGC | | |
| AD- | GCUGAACAUAUACA | 1600 | 3281-3301 | UCAUCUAUGUATA | 1689 | 3279-3301 |
| 1397133.1 | UAGAUGA | | | UGUUCAGCUG | | |
| AD- | CUGAACAUAUACAU | 1601 | 3282-3302 | UACATCTAUGUAUA | 1690 | 3280-3302 |
| 1397134.1 | AGAUGUA | | | UGUUCAGCU | | |
| AD- | GAACAUAUACAUAG | 1602 | 3284-3304 | UCAACATCUAUGUA | 1691 | 3282-3304 |
| 1397135.1 | AUGUUGA | | | UAUGUUCAG | | |
| AD- | AACAUAUACAUAGA | 1603 | 3285-3305 | UGCAACAUCUAUG | 1692 | 3283-3305 |
| 1397136.1 | UGUUGCA | | | UAUAUGUUCA | | |
| AD- | ACAUAUACAUAGAU | 1604 | 3286-3306 | UGGCAACAUCUAU | 1693 | 3284-3306 |
| 1397137.1 | GUUGCCA | | | GUAUAUGUUC | | |
| AD- | GAGUUGUAGUUGGA | 1605 | 3331-3351 | UGACAAAUCCAAC | 1694 | 3329-3351 |
| 1397138.1 | UUUGUCA | | | UACAACUCAA | | |
| AD- | AGUUGUAGUUGGAU | 1606 | 3332-3352 | UAGACAAAUCCAA | 1695 | 3330-3352 |
| 1397139.1 | UUGUCUA | | | CUACAACUCA | | |
| AD- | GUUGUAGUUGGAUU | 1607 | 3333-3353 | UCAGACAAAUCCA | 1696 | 3331-3353 |
| 1397140.1 | UGUCUGA | | | ACUACAACUC | | |
| AD- | UUGUAGUUGGAUUU | 1608 | 3334-3354 | UACAGACAAAUCC | 1697 | 3332-3354 |
| 1397141.1 | GUCUGUA | | | AACUACAACU | | |
| AD- | UGUAGUUGGAUUUG | 1609 | 3335-3355 | UAACAGACAAAUC | 1698 | 3333-3355 |
| 1397142.1 | UCUGUUA | | | CAACUACAAC | | |
| AD- | GUAGUUGGAUUUGU | 1610 | 3336-3356 | UAAACAGACAAAU | 1699 | 3334-3356 |
| 1397143.1 | CUGUUUA | | | CCAACUACAA | | |
| AD- | AGUUGGAUUUGUCU | 1611 | 3338-3358 | UAUAAACAGACAA | 1700 | 3336-3358 |
| 1397144.1 | GUUUAUA | | | AUCCAACUAC | | |
| AD- | UUGGAUUUGUCUGU | 1612 | 3340-3360 | UGCATAAACAGACA | 1701 | 3338-3360 |
| 1397145.1 | UUAUGCA | | | AAUCCAACU | | |
| AD- | GGAUUUGUCUGUUU | 1613 | 3342-3362 | UAAGCATAAACAG | 1702 | 3340-3362 |
| 1397146.1 | AUGCUUA | | | ACAAAUCCAA | | |
| AD- | GAUUUGUCUGUUUA | 1614 | 3343-3363 | UCAAGCAUAAACA | 1703 | 3341-3363 |
| 1397147.1 | UGCUUGA | | | GACAAAUCCA | | |
| AD- | AUUUGUCUGUUUAU | 1615 | 3344-3364 | UCCAAGCAUAAAC | 1704 | 3342-3364 |
| 1397148.1 | GCUUGGA | | | AGACAAAUCC | | |
| AD- | UUUGUCUGUUUAUG | 1616 | 3345-3365 | UUCCAAGCAUAAA | 1705 | 3343-3365 |
| 1397149.1 | CUUGGAA | | | CAGACAAAUC | | |
| AD- | UUGUCUGUUUAUGC | 1617 | 3346-3366 | UAUCCAAGCAUAA | 1706 | 3344-3366 |
| 1397150.1 | UUGGAUA | | | ACAGACAAAU | | |
| AD- | UGUCUGUUUAUGCU | 1618 | 3347-3367 | UAAUCCAAGCAUA | 1707 | 3345-3367 |
| 1397151.1 | UGGAUUA | | | AACAGACAAA | | |
| AD- | UCUGUUUAUGCUUG | 1619 | 3349-3369 | UUGAAUCCAAGCA | 1708 | 3347-3369 |
| 1397152.1 | GAUUCAA | | | UAAACAGACA | | |
| AD- | CUGUUUAUGCUUGG | 1620 | 3350-3370 | UGUGAATCCAAGCA | 1709 | 3348-3370 |
| 1397153.1 | AUUCACA | | | UAAACAGAC | | |
| AD- | UUUAUGCUUGGAUU | 1621 | 3353-3373 | UCUGGUGAAUCCA | 1710 | 3351-3373 |
| 1397154.1 | CACCAGA | | | AGCAUAAACA | | |
| AD- | AUUCACCAGAGUGA | 1622 | 3364-3384 | UUCATAGUCACUCU | 1711 | 3362-3384 |
| 1397155.1 | CUAUGAA | | | GGUGAAUCC | | |
| AD- | UCACCAGAGUGACU | 1623 | 3366-3386 | UUAUCATAGUCACU | 1712 | 3364-3386 |
| 1397156.1 | AUGAUAA | | | CUGGUGAAU | | |
| AD- | CACCAGAGUGACUA | 1624 | 3367-3387 | UCUATCAUAGUCAC | 1713 | 3365-3387 |
| 1397157.1 | UGAUAGA | | | UCUGGUGAA | | |
| AD- | ACCAGAGUGACUAU | 1625 | 3368-3388 | UACUAUCAUAGUC | 1714 | 3366-3388 |
| 1397158.1 | GAUAGUA | | | ACUCUGGUGA | | |
| AD- | CCAGAGUGACUAUG | 1626 | 3369-3389 | UCACTATCAUAGUC | 1715 | 3367-3389 |
| 1397159.1 | AUAGUGA | | | ACUCUGGUG | | |

TABLE 17
Modified Sense and Antisense Strand Sequences of MAPT dsRNA Agents-Screen 5

| | | SEQ | | SEQ | mRNA Target | SEQ |
|---|---|---|---|---|---|---|
| | Sense Sequence | ID | Antisense Sequence | ID | Sequence | ID |
| Duplex ID | 5’ to 3’ | NO: | 5’ to 3’ | NO: | 5’ to 3’ | NO: |
| AD-1397070.1 | ascsgug(Ahd)ccCfAfA | 1716 | VPusdCsaudGcdGagcud | 1805 | UCACGUGACCCAA | 1894 |
| | fgcucgcaugaL96 | | TgGfgucacgusgsa | | GCUCGCAUGG | |
| AD-1397071.1 | csgsuga(Chd)ccAfAfG | 1717 | VPusCfscadTg(C2p)gagc | 1806 | CACGUGACCCAAG | 1895 |
| | fcucgcauggaL96 | | uuGfgGfucacgsusg | | CUCGCAUGGU | |
| AD-1397072.1 | gsusgac(Chd)caAfGfCf | 1718 | VPusAfsccdAu(G2p)cga | 1807 | ACGUGACCCAAGC | 1896 |
| | ucgcaugguaL96 | | gcuUfgGfgucacsgsu | | UCGCAUGGUC | |
| AD-1397073.1 | usgsacc(Chd)aaGfCfUf | 1719 | VPusdGsacdCadTgcgad | 1808 | CGUGACCCAAGCU | 1897 |
| | cgcauggucaL96 | | GcUfugggucascsg | | CGCAUGGUCA | |
| AD-1397074.1 | gsasccc(Ahd)agCfUfCf | 1720 | VPusUfsgadCc(Agn)ugc | 1809 | GUGACCCAAGCUC | 1898 |
| | gcauggucaaL96 | | gagCfuUfgggucsasc | | GCAUGGUCAG | |
| AD-1397075.1 | ascscca(Ahd)gcUfCfGf | 1721 | VPusdCsugdAcdCaugcd | 1810 | UGACCCAAGCUCG | 1899 |
| | cauggucagaL96 | | GaGfcuuggguscsa | | CAUGGUCAGU | |
| AD-1397076.1 | cscscaa(Ghd)cuCfGfCf | 1722 | VPusAfscudGa(C2p)cau | 1811 | GACCCAAGCUCGC | 1900 |
| | auggucaguaL96 | | gcgAfgCfuugggsusc | | AUGGUCAGUA | |
| AD-1397077.1 | cscsaag(Chd)ucGfCfAf | 1723 | VPusUfsacdTg(Agn)cca | 1812 | ACCCAAGCUCGCA | 1901 |
| | uggucaguaaL96 | | ugcGfaGfcuuggsgsu | | UGGUCAGUAA | |
| AD-1397078.1 | csasagc(Uhd)cgCfAfUf | 1724 | VPusUfsuadCu(G2p)acc | 1813 | CCCAAGCUCGCAU | 1902 |
| | ggucaguaaaL96 | | augCfgAfgcuugsgsg | | GGUCAGUAAA | |
| AD-1397079.1 | asgsugu(Ghd)caAfAfU | 1725 | VPusUfsugdTa(G2p)acu | 1814 | GCAGUGUGCAAAU | 1903 |
| | fagucuacaaaL96 | | auuUfgCfacacusgsc | | AGUCUACAAA | |
| AD-1397080.1 | usgscaa(Ahd)uaGfUfC | 1726 | VPusUfsggdTu(Tgn)gua | 1815 | UGUGCAAAUAGUC | 1904 |
| | fuacaaaccaaL96 | | gacUfaUfuugcascsa | | UACAAACCAG | |
| AD-1397081.1 | asusagu(Chd)uaCfAfA | 1727 | VPusUfscadAc(Tgn)ggu | 1816 | AAAUAGUCUACAA | 1905 |
| | faccaguugaaL96 | | uugUfaGfacuaususu | | ACCAGUUGAC | |
| AD-1397082.1 | asgsucu(Ahd)caAfAfC | 1728 | VPusGfsgudCa(Agn)cug | 1817 | AUAGUCUACAAAC | 1906 |
| | fcaguugaccaL96 | | guuUfgUfagacusasu | | CAGUUGACCU | |
| AD-1397083.1 | gsuscua(Chd)aaAfCfCf | 1729 | VPusAfsggdTc(Agn)acu | 1818 | UAGUCUACAAACC | 1907 |
| | aguugaccuaL96 | | gguUfuGfuagacsusa | | AGUUGACCUG | |
| AD-1397084.1 | asgsgca(Ahd)caUfCfCf | 1730 | VPusGfsuudTa(Tgn)gau | 1819 | UUAGGCAACAUCC | 1908 |
| | aucauaaacaL96 | | ggaUfgUfugccusasa | | AUCAUAAACC | |
| AD-1397085.1 | gsgscaa(Chd)auCfCfAf | 1731 | VPusGfsgudTu(Agn)uga | 1820 | UAGGCAACAUCCA | 1909 |
| | ucauaaaccaL96 | | uggAfuGfuugccsusa | | UCAUAAACCA | |
| AD-1397086.1 | gscsaac(Ahd)ucCfAfUf | 1732 | VPusUfsggdTu(Tgn)aug | 1821 | AGGCAACAUCCAU | 1910 |
| | cauaaaccaaL96 | | augGfaUfguugcscsu | | CAUAAACCAG | |
| AD-1397087.1 | asascau(Chd)caUfCfAf | 1733 | VPusCfscudGg(Tgn)uua | 1822 | GCAACAUCCAUCA | 1911 |
| | uaaaccaggaL96 | | ugaUfgGfauguusgsc | | UAAACCAGGA | |
| AD-1397088.1 | asuscug(Ahd)gaAfGfC | 1734 | VPusUfsgadAg(Tgn)caa | 1823 | AAAUCUGAGAAGC | 1912 |
| | fuugacuucaaL96 | | gcuUfcUfcagaususu | | UUGACUUCAA | |
| AD-1397089.1 | csasgca(Uhd)cgAfCfAf | 1735 | VPusAfsgudCu(Agn)cca | 1824 | GGCAGCAUCGACA | 1913 |
| | ugguagacuaL96 | | uguCfgAfugcugscsc | | UGGUAGACUC | |
| AD-1397090.1 | usgsgca(Ghd)caAfCfA | 1736 | VPusdCsaadAudCcuuud | 1825 | AGUGGCAGCAACA | 1914 |
| | faaggauuugaL96 | | GuUfgcugccascsu | | AAGGAUUUGA | |
| AD-1397091.1 | gsgscag(Chd)aaCfAfAf | 1737 | VPusdTscadAadTccuud | 1826 | GUGGCAGCAACAA | 1915 |
| | aggauuugaaL96 | | TgUfugcugccsasc | | AGGAUUUGAA | |
| AD-1397092.1 | asgscaa(Chd)aaAfGfGf | 1738 | VPusGfsuudTc(Agn)aau | 1827 | GCAGCAACAAAGG | 1916 |
| | auuugaaacaL96 | | ccuUfuGfuugcusgsc | | AUUUGAAACU | |
| AD-1397093.1 | csasaca(Ahd)agGfAfUf | 1739 | VPusAfsagdTu(Tgn)caaa | 1828 | AGCAACAAAGGAU | 1917 |
| | uugaaacuuaL96 | | ucCfuUfuguugscsu | | UUGAAACUUG | |
| AD-1397094.1 | asascaa(Ahd)ggAfUfU | 1740 | VPusdCsaadGudTucaad | 1829 | GCAACAAAGGAUU | 1918 |
| | fugaaacuugaL96 | | AuCfcuuuguusgsc | | UGAAACUUGG | |
| AD-1397095.1 | ascsaaa(Ghd)gaUfUfUf | 1741 | VPusdCscadAgdTuucad | 1830 | CAACAAAGGAUUU | 1919 |
| | gaaacuuggaL96 | | AaUfccuuugususg | | GAAACUUGGU | |
| AD-1397096.1 | csasaag(Ghd)auUfUfG | 1742 | VPusdAsccdAadGuuucd | 1831 | AACAAAGGAUUUG | 1920 |
| | faaacuugguaL96 | | AaAfuccuuugsusu | | AAACUUGGUG | |
| AD-1397097.1 | asasagg(Ahd)uuUfGfA | 1743 | VPusdCsacdCadAguuud | 1832 | ACAAAGGAUUUGA | 1921 |
| | faacuuggugaL96 | | CaAfauccuuusgsu | | AACUUGGUGU | |
| AD-1397098.1 | asasgga(Uhd)uuGfAfA | 1744 | VPusdAscadCcdAaguud | 1833 | CAAAGGAUUUGAA | 1922 |
| | facuugguguaL96 | | TcAfaauccuususg | | ACUUGGUGUG | |
| AD-1397099.1 | gsasuuu(Ghd)aaAfCfU | 1745 | VPusAfsacdAc(Agn)cca | 1834 | AGGAUUUGAAACU | 1923 |
| | fugguguguuaL96 | | aguUfuCfaaaucscsu | | UGGUGUGUUC | |
| AD-1397101.1 | gsgscag(Ahd)cgAfUfG | 1746 | VPusCfsaadGg(Tgn)uga | 1835 | CAGGCAGACGAUG | 1924 |
| | fucaaccuugaL96 | | cauCfgUfcugccsusg | | UCAACCUUGU | |
| AD-1397102.1 | asgsacg(Ahd)ugUfCfA | 1747 | VPusdAscadCadAgguud | 1836 | GCAGACGAUGUCA | 1925 |
| | faccuuguguaL96 | | GaCfaucgucusgsc | | ACCUUGUGUG | |
| AD-1397103.1 | gsasugu(Chd)aaCfCfUf | 1748 | VPusAfscudCa(C2p)acaa | 1837 | ACGAUGUCAACCU | 1926 |
| | ugugugaguaL96 | | ggUfuGfacaucsgsu | | UGUGUGAGUG | |
| AD-1397104.1 | gscsucc(Ahd)caGfAfA | 1749 | VPusAfsaadCa(G2p)ggu | 1838 | CUGCUCCACAGAA | 1927 |
| | facccuguuuaL96 | | uucUfgUfggagcsasg | | ACCCUGUUUU | |
| AD-1397105.1 | ususgag(Uhd)ucUfGfA | 1750 | VPusUfsucdCa(Agn)ccu | 1839 | UAUUGAGUUCUGA | 1928 |
| | fagguuggaaaL96 | | ucaGfaAfcucaasusa | | AGGUUGGAAC | |
| AD-1397106.1 | usgsagu(Uhd)cuGfAfA | 1751 | VPusGfsuudCc(Agn)acc | 1840 | AUUGAGUUCUGAA | 1929 |
| | fgguuggaacaL96 | | uucAfgAfacucasasu | | GGUUGGAACU | |
| AD-1397107.1 | usasggg(Chd)uaAfCfC | 1752 | VPusdAsagdAgdAacugd | 1841 | UUUAGGGCUAACC | 1930 |
| | faguucucuuaL96 | | GuUfagcccuasasa | | AGUUCUCUUU | |
| AD-1397108.1 | gsgsgcu(Ahd)acCfAfG | 1753 | VPusdCsaadAgdAgaacd | 1842 | UAGGGCUAACCAG | 1931 |
| | fuucucuuugaL96 | | TgGfuuageccsusa | | UUCUCUUUGU | |
| AD-1397109.1 | gsgscua(Ahd)ccAfGfU | 1754 | VPusdAscadAadGagaad | 1843 | AGGGCUAACCAGU | 1932 |
| | fucucuuuguaL96 | | CuGfguuagccscsu | | UCUCUUUGUA | |
| AD-1397110.1 | asascca(Ghd)uuCfUfCf | 1755 | VPusdCscudTadCaaagd | 1844 | CUAACCAGUUCUC | 1933 |
| | uuuguaaggaL96 | | AgAfacugguusasg | | UUUGUAAGGA | |
| AD-1397111.1 | ascscag(Uhd)ucUfCfUf | 1756 | VPusUfsccdTu(Agn)caaa | 1845 | UAACCAGUUCUCU | 1934 |
| | uuguaaggaaL96 | | gaGfaAfcuggususa | | UUGUAAGGAC | |
| AD-1397112.1 | cscsagu(Uhd)cuCfUfU | 1757 | VPusGfsucdCu(Tgn)acaa | 1846 | AACCAGUUCUCUU | 1935 |
| | fuguaaggacaL96 | | agAfgAfacuggsusu | | UGUAAGGACU | |
| AD-1397113.1 | asgsuuc(Uhd)cuUfUfG | 1758 | VPusAfsagdTc(C2p)uua | 1847 | CCAGUUCUCUUUG | 1936 |
| | fuaaggacuuaL96 | | caaAfgAfgaacusgsg | | UAAGGACUUG | |
| AD-1397114.1 | gsusucu(Chd)uuUfGfU | 1759 | VPusCfsaadGu(C2p)cuu | 1848 | CAGUUCUCUUUGU | 1937 |
| | faaggacuugaL96 | | acaAfaGfagaacsusg | | AAGGACUUGU | |
| AD-1397115.1 | ususcuc(Uhd)uuGfUfA | 1760 | VPusAfscadAg(Tgn)ccu | 1849 | AGUUCUCUUUGUA | 1938 |
| | faggacuuguaL96 | | uacAfaAfgagaascsu | | AGGACUUGUG | |
| AD-1397116.1 | csuscuu(Uhd)guAfAfG | 1761 | VPusdGscadCadAguccd | 1850 | UUCUCUUUGUAAG | 1939 |
| | fgacuugugcaL96 | | TuAfcaaagagsasa | | GACUUGUGCC | |
| AD-1397117.1 | cscsaua(Chd)ugAfGfG | 1762 | VPusUfsaadTu(Tgn)cacc | 1851 | CUCCAUACUGAGG | 1940 |
| | fgugaaauuaaL96 | | cuCfaGfuauggsasg | | GUGAAAUUAA | |
| AD-1397118.1 | asusacu(Ghd)agGfGfU | 1763 | VPusdCsuudAadTuucad | 1852 | CCAUACUGAGGGU | 1941 |
| | fgaaauuaagaL96 | | CcCfucaguausgsg | | GAAAUUAAGG | |
| AD-1397119.1 | ascsuga(Ghd)ggUfGfA | 1764 | VPusdCsccdTudAauuud | 1853 | AUACUGAGGGUGA | 1942 |
| | faauuaagggaL96 | | CaCfccucagusasu | | AAUUAAGGGA | |
| AD-1397120.1 | csusgag(Ghd)guGfAfA | 1765 | VPusdTsccdCudTaauud | 1854 | UACUGAGGGUGAA | 1943 |
| | fauuaagggaaL96 | | TcAfcccucagsusa | | AUUAAGGGAA | |
| AD-1397121.1 | usgsagg(Ghd)ugAfAfA | 1766 | VPusUfsucdCc(Tgn)uaa | 1855 | ACUGAGGGUGAAA | 1944 |
| | fuuaagggaaaL96 | | uuuCfaCfccucasgsu | | UUAAGGGAAG | |
| AD-1397122.1 | gsasggg(Uhd)gaAfAfU | 1767 | VPusCfsuudCc(C2p)uua | 1856 | CUGAGGGUGAAAU | 1945 |
| | fuaagggaagaL96 | | auuUfcAfcccucsasg | | UAAGGGAAGG | |
| AD-1397123.1 | gscscuc(Uhd)caCfUfCf | 1768 | VPusUfsggdAa(C2p)uga | 1857 | CAGCCUCUCACUC | 1946 |
| | ucaguuccaaL96 | | gagUfgAfgaggcsusg | | UCAGUUCCAC | |
| AD-1397124.1 | csuscuc(Ahd)cuCfUfCf | 1769 | VPusAfsgudGg(Agn)acu | 1858 | GCCUCUCACUCUC | 1947 |
| | aguuccacuaL96 | | gagAfgUfgagagsgsc | | AGUUCCACUC | |
| AD-1397125.1 | uscsuca(Ghd)uuCfCfA | 1770 | VPusUfsugdGa(Tgn)gag | 1859 | ACUCUCAGUUCCA | 1948 |
| | fcucauccaaaL96 | | uggAfaCfugagasgsu | | CUCAUCCAAC | |
| AD-1397126.1 | usasggu(Ghd)uuUfCfU | 1771 | VPusdCsaadCadAggcad | 1860 | CCUAGGUGUUUCU | 1949 |
| | fgccuuguugaL96 | | GaAfacaccuasgsg | | GCCUUGUUGA | |
| AD-1397127.1 | asgsgug(Uhd)uuCfUfG | 1772 | VPusdTscadAcdAaggcd | 1861 | CUAGGUGUUUCUG | 1950 |
| | fccuuguugaaL96 | | AgAfaacaccusasg | | CCUUGUUGAC | |
| AD-1397128.1 | gsusguu(Uhd)cuGfCfC | 1773 | VPusUfsgudCa(Agn)caa | 1862 | AGGUGUUUCUGCC | 1951 |
| | fuuguugacaaL96 | | ggcAfgAfaacacscsu | | UUGUUGACAU | |
| AD-1397129.1 | usgsuuu(Chd)ugCfCfU | 1774 | VPusAfsugdTc(Agn)aca | 1863 | GGUGUUUCUGCCU | 1952 |
| | fuguugacauaL96 | | aggCfaGfaaacascsc | | UGUUGACAUG | |
| AD-1397130.1 | gsasagc(Chd)auGfCfUf | 1775 | VPusAfsgadAc(Agn)gac | 1864 | UGGAAGCCAUGCU | 1953 |
| | gucuguucuaL96 | | agcAfuGfgcuucscsa | | GUCUGUUCUG | |
| AD-1397131.1 | asgscag(Chd)ugAfAfC | 1776 | VPusUfsaudGu(Agn)uau | 1865 | GGAGCAGCUGAAC | 1954 |
| | fauauacauaaL96 | | guuCfaGfcugcuscsc | | AUAUACAUAG | |
| AD-1397132.1 | asgscug(Ahd)acAfUfA | 1777 | VPusdAsucdTadTguaud | 1866 | GCAGCUGAACAUA | 1955 |
| | fuacauagauaL96 | | AuGfuucagcusgsc | | UACAUAGAUG | |
| AD-1397133.1 | gscsuga(Ahd)caUfAfU | 1778 | VPusdCsaudCudAuguad | 1867 | CAGCUGAACAUAU | 1956 |
| | facauagaugaL96 | | TaUfguucagcsusg | | ACAUAGAUGU | |
| AD-1397134.1 | csusgaa(Chd)auAfUfA | 1779 | VPusAfscadTc(Tgn)augu | 1868 | AGCUGAACAUAUA | 1957 |
| | fcauagauguaL96 | | auAfuGfuucagscsu | | CAUAGAUGUU | |
| AD-1397135.1 | gsasaca(Uhd)auAfCfAf | 1780 | VPusdCsaadCadTcuaud | 1869 | CUGAACAUAUACA | 1958 |
| | uagauguugaL96 | | GuAfuauguucsasg | | UAGAUGUUGC | |
| AD-1397136.1 | asascau(Ahd)uaCfAfUf | 1781 | VPusGfscadAc(Agn)ucu | 1870 | UGAACAUAUACAU | 1959 |
| | agauguugcaL96 | | augUfaUfauguuscsa | | AGAUGUUGCC | |
| AD-1397137.1 | ascsaua(Uhd)acAfUfAf | 1782 | VPusGfsgcdAa(C2p)auc | 1871 | GAACAUAUACAUA | 1960 |
| | gauguugccaL96 | | uauGfuAfuaugususc | | GAUGUUGCCC | |
| AD-1397138.1 | gsasguu(Ghd)uaGfUfU | 1783 | VPusdGsacdAadAuccad | 1872 | UUGAGUUGUAGUU | 1961 |
| | fggauuugucaL96 | | AcUfacaacucsasa | | GGAUUUGUCU | |
| AD-1397139.1 | asgsuug(Uhd)agUfUfG | 1784 | VPusdAsgadCadAauccd | 1873 | UGAGUUGUAGUUG | 1962 |
| | fgauuugucuaL96 | | AaCfuacaacuscsa | | GAUUUGUCUG | |
| AD-1397140.1 | gsusugu(Ahd)guUfGfG | 1785 | VPusdCsagdAcdAaaucd | 1874 | GAGUUGUAGUUGG | 1963 |
| | fauuugucugaL96 | | CaAfcuacaacsusc | | AUUUGUCUGU | |
| AD-1397141.1 | ususgua(Ghd)uuGfGfA | 1786 | VPusAfscadGa(C2p)aaa | 1875 | AGUUGUAGUUGGA | 1964 |
| | fuuugucuguaL96 | | uccAfaCfuacaascsu | | UUUGUCUGUU | |
| AD-1397142.1 | usgsuag(Uhd)ugGfAfU | 1787 | VPusAfsacdAg(Agn)caa | 1876 | GUUGUAGUUGGAU | 1965 |
| | fuugucuguuaL96 | | aucCfaAfcuacasasc | | UUGUCUGUUU | |
| AD-1397143.1 | gsusagu(Uhd)ggAfUfU | 1788 | VPusAfsaadCa(G2p)acaa | 1877 | UUGUAGUUGGAUU | 1966 |
| | fugucuguuuaL96 | | auCfcAfacuacsasa | | UGUCUGUUUA | |
| AD-1397144.1 | asgsuug(Ghd)auUfUfG | 1789 | VPusdAsuadAadCagacd | 1878 | GUAGUUGGAUUUG | 1967 |
| | fucuguuuauaL96 | | AaAfuccaacusasc | | UCUGUUUAUG | |
| AD-1397145.1 | ususgga(Uhd)uuGfUfC | 1790 | VPusdGscadTadAacagd | 1879 | AGUUGGAUUUGUC | 1968 |
| | fuguuuaugcaL96 | | AcAfaauccaascsu | | UGUUUAUGCU | |
| AD-1397146.1 | gsgsauu(Uhd)guCfUfG | 1791 | VPusAfsagdCa(Tgn)aaac | 1880 | UUGGAUUUGUCUG | 1969 |
| | fuuuaugcuuaL96 | | agAfcAfaauccsasa | | UUUAUGCUUG | |
| AD-1397147.1 | gsasuuu(Ghd)ucUfGfU | 1792 | VPusCfsaadGc(Agn)uaa | 1881 | UGGAUUUGUCUGU | 1970 |
| | fuuaugcuugaL96 | | acaGfaCfaaaucscsa | | UUAUGCUUGG | |
| AD-1397148.1 | asusuug(Uhd)cuGfUfU | 1793 | VPusCfscadAg(C2p)aua | 1882 | GGAUUUGUCUGUU | 1971 |
| | fuaugcuuggaL96 | | aacAfgAfcaaauscsc | | UAUGCUUGGA | |
| AD-1397149.1 | ususugu(Chd)ugUfUfU | 1794 | VPusUfsccdAa(G2p)cau | 1883 | GAUUUGUCUGUUU | 1972 |
| | faugcuuggaaL96 | | aaaCfaGfacaaasusc | | AUGCUUGGAU | |
| AD-1397150.1 | ususguc(Uhd)guUfUfA | 1795 | VPusdAsucdCadAgcaud | 1884 | AUUUGUCUGUUUA | 1973 |
| | fugcuuggauaL96 | | AaAfcagacaasasu | | UGCUUGGAUU | |
| AD-1397151.1 | usgsucu(Ghd)uuUfAfU | 1796 | VPusAfsaudCc(Agn)agc | 1885 | UUUGUCUGUUUAU | 1974 |
| | fgcuuggauuaL96 | | auaAfaCfagacasasa | | GCUUGGAUUC | |
| AD-1397152.1 | uscsugu(Uhd)uaUfGfC | 1797 | VPusUfsgadAu(C2p)caa | 1886 | UGUCUGUUUAUGC | 1975 |
| | fuuggauucaaL96 | | gcaUfaAfacagascsa | | UUGGAUUCAC | |
| AD-1397153.1 | csusguu(Uhd)auGfCfU | 1798 | VPusGfsugdAa(Tgn)cca | 1887 | GUCUGUUUAUGCU | 1976 |
| | fuggauucacaL96 | | agcAfuAfaacagsasc | | UGGAUUCACC | |
| AD-1397154.1 | ususuau(Ghd)cuUfGfG | 1799 | VPusCfsugdGu(G2p)aau | 1888 | UGUUUAUGCUUGG | 1977 |
| | fauucaccagaL96 | | ccaAfgCfauaaascsa | | AUUCACCAGA | |
| AD-1397155.1 | asusuca(Chd)caGfAfGf | 1800 | VPusUfscadTa(G2p)ucac | 1889 | GGAUUCACCAGAG | 1978 |
| | ugacuaugaaL96 | | ucUfgGfugaauscsc | | UGACUAUGAU | |
| AD-1397156.1 | uscsacc(Ahd)gaGfUfG | 1801 | VPusUfsaudCa(Tgn)agu | 1890 | AUUCACCAGAGUG | 1979 |
| | facuaugauaaL96 | | cacUfcUfggugasasu | | ACUAUGAUAG | |
| AD-1397157.1 | csascca(Ghd)agUfGfAf | 1802 | VPusCfsuadTc(Agn)uag | 1891 | UUCACCAGAGUGA | 1980 |
| | cuaugauagaL96 | | ucaCfuCfuggugsasa | | CUAUGAUAGU | |
| AD-1397158.1 | ascscag(Ahd)guGfAfC | 1803 | VPusAfscudAu(C2p)aua | 1892 | UCACCAGAGUGAC | 1981 |
| | fuaugauaguaL96 | | gucAfcUfcuggusgsa | | UAUGAUAGUG | |
| AD-1397159.1 | cscsaga(Ghd)ugAfCfU | 1804 | VPusdCsacdTadTcauad | 1893 | CACCAGAGUGACU | 1982 |
| | faugauagugaL96 | | GuCfacucuggsusg | | AUGAUAGUGA | |

TABLE 18
Unmodified Sense and Antisense Strand Sequences of MAPT dsRNA Agents-Screen 6

| | Sense | | Range in | Antisense | | Range in |
|---|---|---|---|---|---|---|
| | Sequence | SEQ ID | NM_ | Sequence | SEQ ID | NM_ |
| Duplex Name | 5’ to 3’ | NO: | 005910.6 | 5’ to 3’ | NO: | 005910.6 |
| AD-1397160.1 | CAGAGUGACUAUG | 1983 | 3370-3390 | UTCACUAUCAUAGUCA | 2073 | 3368-3390 |
| | AUAGUGAA | | | CUCUGGU | | |
| AD-1397161.1 | GGACGCAUGUAUC | 1984 | 3412-3432 | UAUUTCAAGAUACAUG | 2074 | 3410-3432 |
| | UUGAAAUA | | | CGUCCUU | | |
| AD-1397162.1 | ACGCAUGUAUCUU | 1985 | 3414-3434 | UGCATUTCAAGAUACA | 2075 | 3412-3434 |
| | GAAAUGCA | | | UGCGUCC | | |
| AD-1397163.1 | CGCAUGUAUCUUG | 1986 | 3415-3435 | UAGCAUTUCAAGAUAC | 2076 | 3413-3435 |
| | AAAUGCUA | | | AUGCGUC | | |
| AD-1397164.1 | GCAUGUAUCUUGA | 1987 | 3416-3436 | UAAGCATUUCAAGAUA | 2077 | 3414-3436 |
| | AAUGCUUA | | | CAUGCGU | | |
| AD-1397165.1 | CAUGUAUCUUGAA | 1988 | 3417-3437 | UCAAGCAUUUCAAGAU | 2078 | 3415-3437 |
| | AUGCUUGA | | | ACAUGCG | | |
| AD-1397166.1 | UGUAUCUUGAAAU | 1989 | 3419-3439 | UUACAAGCAUUUCAAG | 2079 | 3417-3439 |
| | GCUUGUAA | | | AUACAUG | | |
| AD-1397167.1 | GUAUCUUGAAAUG | 1990 | 3420-3440 | UUUACAAGCAUUUCAA | 2080 | 3418-3440 |
| | CUUGUAAA | | | GAUACAU | | |
| AD-1397168.1 | CUUGAAAUGCUUG | 1991 | 3424-3444 | UCUCTUTACAAGCAUU | 2081 | 3422-3444 |
| | UAAAGAGA | | | UCAAGAU | | |
| AD-1397169.1 | UUGAAAUGCUUGU | 1992 | 3425-3445 | UCCUCUTUACAAGCAU | 2082 | 3423-3445 |
| | AAAGAGGA | | | UUCAAGA | | |
| AD-1397170.1 | UGAAAUGCUUGUA | 1993 | 3426-3446 | UACCTCTUUACAAGCA | 2083 | 3424-3446 |
| | AAGAGGUA | | | UUUCAAG | | |
| AD-1397171.1 | GAAAUGCUUGUAA | 1994 | 3427-3447 | UAACCUCUUUACAAGC | 2084 | 3425-3447 |
| | AGAGGUUA | | | AUUUCAA | | |
| AD-1397172.1 | AAAUGCUUGUAAA | 1995 | 3428-3448 | UAAACCTCUUUACAAG | 2085 | 3426-3448 |
| | GAGGUUUA | | | CAUUUCA | | |
| AD-1397173.1 | AAUGCUUGUAAAG | 1996 | 3429-3449 | UGAAACCUCUUUACAA | 2086 | 3427-3449 |
| | AGGUUUCA | | | GCAUUUC | | |
| AD-1397174.1 | AUGCUUGUAAAGA | 1997 | 3430-3450 | UAGAAACCUCUTUACA | 2087 | 3428-3450 |
| | GGUUUCUA | | | AGCAUUU | | |
| AD-1397175.1 | UGCUUGUAAAGAG | 1998 | 3431-3451 | UTAGAAACCUCTUUAC | 2088 | 3429-3451 |
| | GUUUCUAA | | | AAGCAUU | | |
| AD-1397176.1 | UUGUAAAGAGGUU | 1999 | 3434-3454 | UGGUTAGAAACCUCUU | 2089 | 3432-3454 |
| | UCUAACCA | | | UACAAGC | | |
| AD-1397177.1 | AUUGCUGCCUAAA | 2000 | 4132-4152 | UGAGTUTCUUUAGGCA | 2090 | 4130-4152 |
| | GAAACUCA | | | GCAAUGU | | |
| AD-1397178.1 | UGCUGCCUAAAGA | 2001 | 4134-4154 | UCUGAGTUUCUUUAGG | 2091 | 4132-4154 |
| | AACUCAGA | | | CAGCAAU | | |
| AD-1397179.1 | UCUGGUUUGGGUA | 2002 | 4179-4199 | UUUAACTGUACCCAAA | 2092 | 4177-4199 |
| | CAGUUAAA | | | CCAGAAG | | |
| AD-1397180.1 | GGUUUGGGUACAG | 2003 | 4182-4202 | UCCUTUAACUGTACCCA | 2093 | 4180-4202 |
| | UUAAAGGA | | | AACCAG | | |
| AD-1397181.1 | UUUGGGUACAGUU | 2004 | 4184-4204 | UUGCCUTUAACUGUAC | 2094 | 4182-4204 |
| | AAAGGCAA | | | CCAAACC | | |
| AD-1397182.1 | GAUUUGGUGGUGG | 2005 | 4395-4415 | UTCUCUAACCACCACCA | 2095 | 4393-4415 |
| | UUAGAGAA | | | AAUCUA | | |
| AD-1397183.1 | UCAUUACUGCCAA | 2006 | 4425-4445 | UGAAACTGUUGGCAGU | 2096 | 4423-4445 |
| | CAGUUUCA | | | AAUGAGG | | |
| AD-1397184.1 | CAUUACUGCCAAC | 2007 | 4426-4446 | UCGAAACUGUUGGCAG | 2097 | 4424-4446 |
| | AGUUUCGA | | | UAAUGAG | | |
| AD-1397185.1 | UACUGCCAACAGU | 2008 | 4429-4449 | UAGCCGAAACUGUUGG | 2098 | 4427-4449 |
| | UUCGGCUA | | | CAGUAAU | | |
| AD-1397186.1 | GUUCCUCUUCCUG | 2009 | 4469-4489 | UAGAACTUCAGGAAGA | 2099 | 4467-4489 |
| | AAGUUCUA | | | GGAACCG | | |
| AD-1397187.1 | UUCCUCUUCCUGA | 2010 | 4470-4490 | UAAGAACUUCAGGAAG | 2100 | 4468-4490 |
| | AGUUCUUA | | | AGGAACC | | |
| AD-1397188.1 | UCCUCUUCCUGAA | 2011 | 4471-4491 | UCAAGAACUUCAGGAA | 2101 | 4469-4491 |
| | GUUCUUGA | | | GAGGAAC | | |
| AD-1397189.1 | CCUCUUCCUGAAG | 2012 | 4472-4492 | UACAAGAACUUCAGGA | 2102 | 4470-4492 |
| | UUCUUGUA | | | AGAGGAA | | |
| AD-1397190.1 | CUCUUCCUGAAGU | 2013 | 4473-4493 | UCACAAGAACUTCAGG | 2103 | 4471-4493 |
| | UCUUGUGA | | | AAGAGGA | | |
| AD-1397191.1 | UCUUCCUGAAGUU | 2014 | 4474-4494 | UGCACAAGAACTUCAG | 2104 | 4472-4494 |
| | CUUGUGCA | | | GAAGAGG | | |
| AD-1397192.1 | CCAGCCUAAGAUC | 2015 | 4569-4589 | UAAACCAUGAUCUUAG | 2105 | 4567-4589 |
| | AUGGUUUA | | | GCUGGCC | | |
| AD-1397193.1 | AGCCUAAGAUCAU | 2016 | 4571-4591 | UCUAAACCAUGAUCUU | 2106 | 4569-4591 |
| | GGUUUAGA | | | AGGCUGG | | |
| AD-1397194.1 | GCCUAAGAUCAUG | 2017 | 4572-4592 | UCCUAAACCAUGAUCU | 2107 | 4570-4592 |
| | GUUUAGGA | | | UAGGCUG | | |
| AD-1397195.1 | UCAGUGCUGGCAG | 2018 | 4596-4616 | UAAUTUAUCUGCCAGC | 2108 | 4594-4616 |
| | AUAAAUUA | | | ACUGAUC | | |
| AD-1397196.1 | CACGCUGGCUUGU | 2019 | 4623-4643 | UUAAGATCACAAGCCA | 2109 | 4621-4643 |
| | GAUCUUAA | | | GCGUGCC | | |
| AD-1397197.1 | UGGGCUAGAUAGG | 2020 | 4721-4741 | UAGUAUAUCCUAUCUA | 2110 | 4719-4741 |
| | AUAUACUA | | | GCCCACC | | |
| AD-1397198.1 | GGGCUAGAUAGGA | 2021 | 4722-4742 | UCAGTATAUCCTAUCUA | 2111 | 4720-4742 |
| | UAUACUGA | | | GCCCAC | | |
| AD-1397199.1 | CUAGAUAGGAUAU | 2022 | 4725-4745 | UAUACAGUAUAUCCUA | 2112 | 4723-4745 |
| | ACUGUAUA | | | UCUAGCC | | |
| AD-1397200.1 | UAGAUAGGAUAUA | 2023 | 4726-4746 | UCAUACAGUAUAUCCU | 2113 | 4724-4746 |
| | CUGUAUGA | | | AUCUAGC | | |
| AD-1397201.1 | ACUCACUUUAUCA | 2024 | 4766-4786 | UGAACUAUUGATAAAG | 2114 | 4764-4786 |
| | AUAGUUCA | | | UGAGUCA | | |
| AD-1397202.1 | CUCACUUUAUCAA | 2025 | 4767-4787 | UGGAACTAUUGAUAAA | 2115 | 4765-4787 |
| | UAGUUCCA | | | GUGAGUC | | |
| AD-1397203.1 | UCACUUUAUCAAU | 2026 | 4768-4788 | UUGGAACUAUUGAUAA | 2116 | 4766-4788 |
| | AGUUCCAA | | | AGUGAGU | | |
| AD-1397204.1 | CACUUUAUCAAUA | 2027 | 4769-4789 | UAUGGAACUAUUGAUA | 2117 | 4767-4789 |
| | GUUCCAUA | | | AAGUGAG | | |
| AD-1397205.1 | ACUUUAUCAAUAG | 2028 | 4770-4790 | UAAUGGAACUAUUGAU | 2118 | 4768-4790 |
| | UUCCAUUA | | | AAAGUGA | | |
| AD-1397206.1 | AUAGUUCCAUUUA | 2029 | 4779-4799 | UGUCAATUUAAAUGGA | 2119 | 4777-4799 |
| | AAUUGACA | | | ACUAUUG | | |
| AD-1397207.1 | GGUGAGACUGUAU | 2030 | 4805-4825 | UAAACAGGAUACAGUC | 2120 | 4803-4825 |
| | CCUGUUUA | | | UCACCAC | | |
| AD-1397208.1 | GUGAGACUGUAUC | 2031 | 4806-4826 | UCAAACAGGAUACAGU | 2121 | 4804-4826 |
| | CUGUUUGA | | | CUCACCA | | |
| AD-1397209.1 | UGAGACUGUAUCC | 2032 | 4807-4827 | UGCAAACAGGATACAG | 2122 | 4805-4827 |
| | UGUUUGCA | | | UCUCACC | | |
| AD-1397210.1 | GAGACUGUAUCCU | 2033 | 4808-4828 | UAGCAAACAGGAUACA | 2123 | 4806-4828 |
| | GUUUGCUA | | | GUCUCAC | | |
| AD-1397211.1 | AGACUGUAUCCUG | 2034 | 4809-4829 | UTAGCAAACAGGAUAC | 2124 | 4807-4829 |
| | UUUGCUAA | | | AGUCUCA | | |
| AD-1397212.1 | CUGUAUCCUGUUU | 2035 | 4812-4832 | UCAATAGCAAACAGGA | 2125 | 4810-4832 |
| | GCUAUUGA | | | UACAGUC | | |
| AD-1397213.1 | UGUAUCCUGUUUG | 2036 | 4813-4833 | UGCAAUAGCAAACAGG | 2126 | 4811-4833 |
| | CUAUUGCA | | | AUACAGU | | |
| AD-1397214.1 | GUAUCCUGUUUGC | 2037 | 4814-4834 | UAGCAATAGCAAACAG | 2127 | 4812-4834 |
| | UAUUGCUA | | | GAUACAG | | |
| AD-1397215.1 | UGAUUUCAACCAC | 2038 | 4936-4956 | UAGCAAAUGUGGUUGA | 2128 | 4934-4956 |
| | AUUUGCUA | | | AAUCAUG | | |
| AD-1397216.1 | UAUGGACAUCUGG | 2039 | 5072-5092 | UAAAGCAACCAGAUGU | 2129 | 5070-5092 |
| | UUGCUUUA | | | CCAUAUU | | |
| AD-1397217.1 | AUGGACAUCUGGU | 2040 | 5073-5093 | UCAAAGCAACCAGAUG | 2130 | 5071-5093 |
| | UGCUUUGA | | | UCCAUAU | | |
| AD-1397218.1 | ACUUCUGAUUUCU | 2041 | 5345-5365 | UGCUGAAGAGAAAUCA | 2131 | 5343-5365 |
| | CUUCAGCA | | | GAAGUUU | | |
| AD-1397219.1 | CUUCUGAUUUCUC | 2042 | 5346-5366 | UAGCTGAAGAGAAAUC | 2132 | 5344-5366 |
| | UUCAGCUA | | | AGAAGUU | | |
| AD-1397220.1 | CUGAUUUCUCUUC | 2043 | 5349-5369 | UCAAAGCUGAAGAGAA | 2133 | 5347-5369 |
| | AGCUUUGA | | | AUCAGAA | | |
| AD-1397221.1 | UGAUUUCUCUUCA | 2044 | 5350-5370 | UUCAAAGCUGAAGAGA | 2134 | 5348-5370 |
| | GCUUUGAA | | | AAUCAGA | | |
| AD-1397222.1 | GAUUUCUCUUCAG | 2045 | 5351-5371 | UTUCAAAGCUGAAGAG | 2135 | 5349-5371 |
| | CUUUGAAA | | | AAAUCAG | | |
| AD-1397223.1 | ACUUGCAAGUCCC | 2046 | 5460-5480 | UAAATCAUGGGACUUG | 2136 | 5458-5480 |
| | AUGAUUUA | | | CAAGUGC | | |
| AD-1397224.1 | CUUGCAAGUCCCA | 2047 | 5461-5481 | UGAAAUCAUGGGACUU | 2137 | 5459-5481 |
| | UGAUUUCA | | | GCAAGUG | | |
| AD-1397225.1 | UGCAAGUCCCAUG | 2048 | 5463-5483 | UAAGAAAUCAUGGGAC | 2138 | 5461-5483 |
| | AUUUCUUA | | | UUGCAAG | | |
| AD-1397226.1 | CAAGUCCCAUGAU | 2049 | 5465-5485 | UCGAAGAAAUCAUGGG | 2139 | 5463-5485 |
| | UUCUUCGA | | | ACUUGCA | | |
| AD-1397227.1 | AGUCCCAUGAUUU | 2050 | 5467-5487 | UACCGAAGAAATCAUG | 2140 | 5465-5487 |
| | CUUCGGUA | | | GGACUUG | | |
| AD-1397228.1 | GUCCCAUGAUUUC | 2051 | 5468-5488 | UTACCGAAGAAAUCAU | 2141 | 5466-5488 |
| | UUCGGUAA | | | GGGACUU | | |
| AD-1397229.1 | UCCCAUGAUUUCU | 2052 | 5469-5489 | UTUACCGAAGAAAUCA | 2142 | 5467-5489 |
| | UCGGUAAA | | | UGGGACU | | |
| AD-1397230.1 | CCCAUGAUUUCUU | 2053 | 5470-5490 | UAUUACCGAAGAAAUC | 2143 | 5468-5490 |
| | CGGUAAUA | | | AUGGGAC | | |
| AD-1397231.1 | CCAUGAUUUCUUC | 2054 | 5471-5491 | UAAUTACCGAAGAAAU | 2144 | 5469-5491 |
| | GGUAAUUA | | | CAUGGGA | | |
| AD-1397232.1 | AGGGACAUGAAAU | 2055 | 5505-5525 | UUAAGATGAUUUCAUG | 2145 | 5503-5525 |
| | CAUCUUAA | | | UCCCUCC | | |
| AD-1397233.1 | GGGACAUGAAAUC | 2056 | 5506-5526 | UCUAAGAUGAUTUCAU | 2146 | 5504-5526 |
| | AUCUUAGA | | | GUCCCUC | | |
| AD-1397234.1 | GGACAUGAAAUCA | 2057 | 5507-5527 | UGCUAAGAUGATUUCA | 2147 | 5505-5527 |
| | UCUUAGCA | | | UGUCCCU | | |
| AD-1397235.1 | GACAUGAAAUCAU | 2058 | 5508-5528 | UAGCTAAGAUGAUUUC | 2148 | 5506-5528 |
| | CUUAGCUA | | | AUGUCCC | | |
| AD-1397236.1 | ACAUGAAAUCAUC | 2059 | 5509-5529 | UAAGCUAAGAUGAUUU | 2149 | 5507-5529 |
| | UUAGCUUA | | | CAUGUCC | | |
| AD-1397237.1 | AUGAAAUCAUCUU | 2060 | 5511-5531 | UCUAAGCUAAGAUGAU | 2150 | 5509-5531 |
| | AGCUUAGA | | | UUCAUGU | | |
| AD-1397238.1 | GAAAUCAUCUUAG | 2061 | 5513-5533 | UAGCTAAGCUAAGAUG | 2151 | 5511-5533 |
| | CUUAGCUA | | | AUUUCAU | | |
| AD-1397239.1 | AAAUCAUCUUAGC | 2062 | 5514-5534 | UAAGCUAAGCUAAGAU | 2152 | 5512-5534 |
| | UUAGCUUA | | | GAUUUCA | | |
| AD-1397240.1 | GUGAAUGUCUAUA | 2063 | 5541-5561 | UUACACTAUAUAGACA | 2153 | 5539-5561 |
| | UAGUGUAA | | | UUCACAG | | |
| AD-1397241.1 | AAUGUCUAUAUAG | 2064 | 5544-5564 | UCAATACACUATAUAG | 2154 | 5542-5564 |
| | UGUAUUGA | | | ACAUUCA | | |
| AD-1397242.1 | UGUCUAUAUAGUG | 2065 | 5546-5566 | UCACAATACACTAUAU | 2155 | 5544-5566 |
| | UAUUGUGA | | | AGACAUU | | |
| AD-1397243.1 | GUCUAUAUAGUGU | 2066 | 5547-5567 | UACACAAUACACUAUA | 2156 | 5545-5567 |
| | AUUGUGUA | | | UAGACAU | | |
| AD-1397244.1 | UCUAUAUAGUGUA | 2067 | 5548-5568 | UCACACAAUACACUAU | 2157 | 5546-5568 |
| | UUGUGUGA | | | AUAGACA | | |
| AD-1397245.1 | UAUAUAGUGUAUU | 2068 | 5550-5570 | UAACACACAAUACACU | 2158 | 5548-5570 |
| | GUGUGUUA | | | AUAUAGA | | |
| AD-1397246.1 | AUAUAGUGUAUUG | 2069 | 5551-5571 | UAAACACACAAUACAC | 2159 | 5549-5571 |
| | UGUGUUUA | | | UAUAUAG | | |
| AD-1397247.1 | CAAAUGAUUUACA | 2070 | 5574-5594 | UCAGTCAGUGUAAAUC | 2160 | 5572-5594 |
| | CUGACUGA | | | AUUUGUU | | |
| AD-1397248.1 | AAUGAUUUACACU | 2071 | 5576-5596 | UAACAGTCAGUGUAAA | 2161 | 5574-5596 |
| | GACUGUUA | | | UCAUUUG | | |
| AD-1397249.1 | GAAAUAAAGUUAU | 2072 | 5614-5634 | UCAGAGTAAUAACUUU | 2162 | 5612-5634 |
| | UACUCUGA | | | AUUUCCA | | |

TABLE 19
Modified Sense and Antisense Strand Sequences of MAPT dsRNA Agents-Screen 6

| | | | | SEQ | mRNA Target | SEQ |
|---|---|---|---|---|---|---|
| | Sense Sequence | SEQ | Antisense Sequence | ID | Sequence | ID |
| Duplex ID | 5’ to 3’ | ID NO: | 5’ to 3’ | NO: | 5’ to 3’ | NO: |
| AD-1397160.1 | csasgag(Uhd)gaCfUfA | 2163 | VPusdCsaudGcdGagcud | 2253 | ACCAGAGUGACUA | 2343 |
| | fugauagugaaL96 | | TgGfgucacgusgsa | | UGAUAGUGAA | |
| AD-1397161.1 | gsgsacg(Chd)auGfUf | 2164 | VPusCfscadTg(C2p)gag | 2254 | AAGGACGCAUGUA | 2344 |
| | AfucuugaaauaL96 | | cuuGfgGfucacgsusg | | UCUUGAAAUG | |
| AD-1397162.1 | ascsgca(Uhd)guAfUfC | 2165 | VPusAfsccdAu(G2p)cga | 2255 | GGACGCAUGUAUC | 2345 |
| | fuugaaaugcaL96 | | gcuUfgGfgucacsgsu | | UUGAAAUGCU | |
| AD-1397163.1 | csgscau(Ghd)uaUfCfU | 2166 | VPusdGsacdCadTgcgad | 2256 | GACGCAUGUAUCU | 2346 |
| | fugaaaugcuaL96 | | GcUfugggucascsg | | UGAAAUGCUU | |
| AD-1397164.1 | gscsaug(Uhd)auCfUf | 2167 | VPusUfsgadCc(Agn)ugc | 2257 | ACGCAUGUAUCUU | 2347 |
| | UfgaaaugcuuaL96 | | gagCfuUfgggucsasc | | GAAAUGCUUG | |
| AD-1397165.1 | csasugu(Ahd)ucUfUf | 2168 | VPusdCsugdAcdCaugcd | 2258 | CGCAUGUAUCUUG | 2348 |
| | GfaaaugcuugaL96 | | GaGfcuuggguscsa | | AAAUGCUUGU | |
| AD-1397166.1 | usgsuau(Chd)uuGfAf | 2169 | VPusAfscudGa(C2p)cau | 2259 | CAUGUAUCUUGAA | 2349 |
| | AfaugcuuguaaL96 | | gcgAfgCfuugggsusc | | AUGCUUGUAA | |
| AD-1397167.1 | gsusauc(Uhd)ugAfAf | 2170 | VPusUfsacdTg(Agn)cca | 2260 | AUGUAUCUUGAAA | 2350 |
| | AfugcuuguaaaL96 | | ugcGfaGfcuuggsgsu | | UGCUUGUAAA | |
| AD-1397168.1 | csusuga(Ahd)auGfCf | 2171 | VPusUfsuadCu(G2p)acc | 2261 | AUCUUGAAAUGCU | 2351 |
| | UfuguaaagagaL96 | | augCfgAfgcuugsgsg | | UGUAAAGAGG | |
| AD-1397169.1 | ususgaa(Ahd)ugCfUf | 2172 | VPusUfsugdTa(G2p)acu | 2262 | UCUUGAAAUGCUU | 2352 |
| | UfguaaagaggaL96 | | auuUfgCfacacusgsc | | GUAAAGAGGU | |
| AD-1397170.1 | usgsaaa(Uhd)gcUfUfG | 2173 | VPusUfsggdTu(Tgn)gua | 2263 | CUUGAAAUGCUUG | 2353 |
| | fuaaagagguaL96 | | gacUfaUfuugcascsa | | UAAAGAGGUU | |
| AD-1397171.1 | gsasaau(Ghd)cuUfGfU | 2174 | VPusUfscadAc(Tgn)ggu | 2264 | UUGAAAUGCUUGU | 2354 |
| | faaagagguuaL96 | | uugUfaGfacuaususu | | AAAGAGGUUU | |
| AD-1397172.1 | asasaug(Chd)uuGfUf | 2175 | VPusGfsgudCa(Agn)cug | 2265 | UGAAAUGCUUGUA | 2355 |
| | AfaagagguuuaL96 | | guuUfgUfagacusasu | | AAGAGGUUUC | |
| AD-1397173.1 | asasugc(Uhd)ugUfAf | 2176 | VPusAfsggdTc(Agn)acu | 2266 | GAAAUGCUUGUAA | 2356 |
| | AfagagguuucaL96 | | gguUfuGfuagacsusa | | AGAGGUUUCU | |
| AD-1397174.1 | asusgcu(Uhd)guAfAf | 2177 | VPusGfsuudTa(Tgn)gau | 2267 | AAAUGCUUGUAAA | 2357 |
| | AfgagguuucuaL96 | | ggaUfgUfugccusasa | | GAGGUUUCUA | |
| AD-1397175.1 | usgscuu(Ghd)uaAfAf | 2178 | VPusGfsgudTu(Agn)uga | 2268 | AAUGCUUGUAAAG | 2358 |
| | GfagguuucuaaL96 | | uggAfuGfuugecsusa | | AGGUUUCUAA | |
| AD-1397176.1 | ususgua(Ahd)agAfGf | 2179 | VPusUfsggdTu(Tgn)aug | 2269 | GCUUGUAAAGAGG | 2359 |
| | GfuuucuaaccaL96 | | augGfaUfguugcscsu | | UUUCUAACCC | |
| AD-1397177.1 | asusugc(Uhd)gcCfUf | 2180 | VPusCfscudGg(Tgn)uua | 2270 | ACAUUGCUGCCUA | 2360 |
| | AfaagaaacucaL96 | | ugaUfgGfauguusgsc | | AAGAAACUCA | |
| AD-1397178.1 | usgscug(Chd)cuAfAf | 2181 | VPusUfsgadAg(Tgn)caa | 2271 | AUUGCUGCCUAAA | 2361 |
| | AfgaaacucagaL96 | | gcuUfcUfcagaususu | | GAAACUCAGC | |
| AD-1397179.1 | uscsugg(Uhd)uuGfGf | 2182 | VPusAfsgudCu(Agn)cca | 2272 | CUUCUGGUUUGGG | 2362 |
| | GfuacaguuaaaL96 | | uguCfgAfugcugscsc | | UACAGUUAAA | |
| AD-1397180.1 | gsgsuuu(Ghd)ggUfAf | 2183 | VPusdCsaadAudCcuuud | 2273 | CUGGUUUGGGUAC | 2363 |
| | CfaguuaaaggaL96 | | GuUfgcugccascsu | | AGUUAAAGGC | |
| AD-1397181.1 | ususugg(Ghd)uaCfAf | 2184 | VPusdTscadAadTccuud | 2274 | GGUUUGGGUACAG | 2364 |
| | GfuuaaaggcaaL96 | | TgUfugcugccsasc | | UUAAAGGCAA | |
| AD-1397182.1 | gsasuuu(Ghd)guGfGf | 2185 | VPusGfsuudTc(Agn)aau | 2275 | UAGAUUUGGUGGU | 2365 |
| | UfgguuagagaaL96 | | ccuUfuGfuugcusgsc | | GGUUAGAGAU | |
| AD-1397183.1 | uscsauu(Ahd)cuGfCfC | 2186 | VPusAfsagdTu(Tgn)caa | 2276 | CCUCAUUACUGCC | 2366 |
| | faacaguuucaL96 | | aucCfuUfuguugscsu | | AACAGUUUCG | |
| AD-1397184.1 | csasuua(Chd)ugCfCfA | 2187 | VPusdCsaadGudTucaad | 2277 | CUCAUUACUGCCA | 2367 |
| | facaguuucgaL96 | | AuCfcuuuguusgsc | | ACAGUUUCGG | |
| AD-1397185.1 | usascug(Chd)caAfCfA | 2188 | VPusdCscadAgdTuucad | 2278 | AUUACUGCCAACA | 2368 |
| | fguuucggcuaL96 | | AaUfccuuugususg | | GUUUCGGCUG | |
| AD-1397186.1 | gsusucc(Uhd)cuUfCfC | 2189 | VPusdAsccdAadGuuucd | 2279 | CGGUUCCUCUUCC | 2369 |
| | fugaaguucuaL96 | | AaAfuccuuugsusu | | UGAAGUUCUU | |
| AD-1397187.1 | ususccu(Chd)uuCfCfU | 2190 | VPusdCsacdCadAguuud | 2280 | GGUUCCUCUUCCU | 2370 |
| | fgaaguucuuaL96 | | CaAfauccuuusgsu | | GAAGUUCUUG | |
| AD-1397188.1 | uscscuc(Uhd)ucCfUfG | 2191 | VPusdAscadCcdAaguud | 2281 | GUUCCUCUUCCUG | 2371 |
| | faaguucuugaL96 | | TcAfaauccuususg | | AAGUUCUUGU | |
| AD-1397189.1 | cscsucu(Uhd)ccUfGfA | 2192 | VPusAfsacdAc(Agn)cca | 2282 | UUCCUCUUCCUGA | 2372 |
| | faguucuuguaL96 | | aguUfuCfaaaucscsu | | AGUUCUUGUG | |
| AD-1397190.1 | csuscuu(Chd)cuGfAf | 2193 | VPusCfsaadGg(Tgn)uga | 2283 | UCCUCUUCCUGAA | 2373 |
| | AfguucuugugaL96 | | cauCfgUfcugccsusg | | GUUCUUGUGC | |
| AD-1397191.1 | uscsuuc(Chd)ugAfAf | 2194 | VPusdAscadCadAgguud | 2284 | CCUCUUCCUGAAG | 2374 |
| | GfuucuugugcaL96 | | GaCfaucgucusgsc | | UUCUUGUGCC | |
| AD-1397192.1 | cscsagc(Chd)uaAfGfA | 2195 | VPusAfscudCa(C2p)acaa | 2285 | GGCCAGCCUAAGA | 2375 |
| | fucaugguuuaL96 | | ggUfuGfacaucsgsu | | UCAUGGUUUA | |
| AD-1397193.1 | asgsccu(Ahd)agAfUfC | 2196 | VPusAfsaadCa(G2p)ggu | 2286 | CCAGCCUAAGAUC | 2376 |
| | faugguuuagaL96 | | uucUfgUfggagcsasg | | AUGGUUUAGG | |
| AD-1397194.1 | gscscua(Ahd)gaUfCfA | 2197 | VPusUfsucdCa(Agn)ccu | 2287 | CAGCCUAAGAUCA | 2377 |
| | fugguuuaggaL96 | | ucaGfaAfcucaasusa | | UGGUUUAGGG | |
| AD-1397195.1 | uscsagu(Ghd)cuGfGf | 2198 | VPusGfsuudCc(Agn)acc | 2288 | GAUCAGUGCUGGC | 2378 |
| | CfagauaaauuaL96 | | uucAfgAfacucasasu | | AGAUAAAUUG | |
| AD-1397196.1 | csascgc(Uhd)ggCfUfU | 2199 | VPusdAsagdAgdAacugd | 2289 | GGCACGCUGGCUU | 2379 |
| | fgugaucuuaaL96 | | GuUfagcccuasasa | | GUGAUCUUAA | |
| AD-1397197.1 | usgsggc(Uhd)agAfUf | 2200 | VPusdTscadCudAucaud | 2290 | GGUGGGCUAGAUA | 2380 |
| | AfggauauacuaL96 | | AgUfcacucugsgsu | | GGAUAUACUG | |
| AD-1397198.1 | gsgsgcu(Ahd)gaUfAf | 2201 | VPusAfsuudTc(Agn)aga | 2291 | GUGGGCUAGAUAG | 2381 |
| | GfgauauacugaL96 | | uacAfuGfcguccsusu | | GAUAUACUGU | |
| AD-1397199.1 | csusaga(Uhd)agGfAfU | 2202 | VPusGfscadTu(Tgn)caa | 2292 | GGCUAGAUAGGAU | 2382 |
| | fauacuguauaL96 | | gauAfcAfugcguscsc | | AUACUGUAUG | |
| AD-1397200.1 | usasgau(Ahd)ggAfUf | 2203 | VPusdAsgcdAudTucaad | 2293 | GCUAGAUAGGAUA | 2383 |
| | AfuacuguaugaL96 | | GaUfacaugcgsusc | | UACUGUAUGC | |
| AD-1397201.1 | ascsuca(Chd)uuUfAfU | 2204 | VPusAfsagdCa(Tgn)uuc | 2294 | UGACUCACUUUAU | 2384 |
| | fcaauaguucaL96 | | aagAfuAfcaugcsgsu | | CAAUAGUUCC | |
| AD-1397202.1 | csuscac(Uhd)uuAfUfC | 2205 | VPusCfsaadGc(Agn)uuu | 2295 | GACUCACUUUAUC | 2385 |
| | faauaguuccaL96 | | caaGfaUfacaugscsg | | AAUAGUUCCA | |
| AD-1397203.1 | uscsacu(Uhd)uaUfCfA | 2206 | VPusUfsacdAa(G2p)cau | 2296 | ACUCACUUUAUCA | 2386 |
| | fauaguuccaaL96 | | uucAfaGfauacasusg | | AUAGUUCCAU | |
| AD-1397204.1 | csascuu(Uhd)auCfAfA | 2207 | VPusUfsuadCa(Agn)gca | 2297 | CUCACUUUAUCAA | 2387 |
| | fuaguuccauaL96 | | uuuCfaAfgauacsasu | | UAGUUCCAUU | |
| AD-1397205.1 | ascsuuu(Ahd)ucAfAf | 2208 | VPusdCsucdTudTacaad | 2298 | UCACUUUAUCAAU | 2388 |
| | UfaguuccauuaL96 | | GcAfuuucaagsasu | | AGUUCCAUUU | |
| AD-1397206.1 | asusagu(Uhd)ccAfUfU | 2209 | VPusdCscudCudTuacad | 2299 | CAAUAGUUCCAUU | 2389 |
| | fuaaauugacaL96 | | AgCfauuucaasgsa | | UAAAUUGACU | |
| AD-1397207.1 | gsgsuga(Ghd)acUfGf | 2210 | VPusAfsccdTc(Tgn)uuac | 2300 | GUGGUGAGACUGU | 2390 |
| | UfauccuguuuaL96 | | aaGfcAfuuucasasg | | AUCCUGUUUG | |
| AD-1397208.1 | gsusgag(Ahd)cuGfUf | 2211 | VPusAfsacdCu(C2p)uuu | 2301 | UGGUGAGACUGUA | 2391 |
| | AfuccuguuugaL96 | | acaAfgCfauuucsasa | | UCCUGUUUGC | |
| AD-1397209.1 | usgsaga(Chd)ugUfAf | 2212 | VPusAfsaadCc(Tgn)cuu | 2302 | GGUGAGACUGUAU | 2392 |
| | UfccuguuugcaL96 | | uacAfaGfcauuuscsa | | CCUGUUUGCU | |
| AD-1397210.1 | gsasgac(Uhd)guAfUf | 2213 | VPusGfsaadAc(C2p)ucu | 2303 | GUGAGACUGUAUC | 2393 |
| | CfcuguuugcuaL96 | | uuaCfaAfgcauususc | | CUGUUUGCUA | |
| AD-1397211.1 | asgsacu(Ghd)uaUfCfC | 2214 | VPusdAsgadAadCcucud | 2304 | UGAGACUGUAUCC | 2394 |
| | fuguuugcuaaL96 | | TuAfcaagcaususu | | UGUUUGCUAU | |
| AD-1397212.1 | csusgua(Uhd)ccUfGfU | 2215 | VPusdTsagdAadAccucd | 2305 | GACUGUAUCCUGU | 2395 |
| | fuugcuauugaL96 | | TuUfacaagcasusu | | UUGCUAUUGC | |
| AD-1397213.1 | usgsuau(Chd)cuGfUf | 2216 | VPusGfsgudTa(G2p)aaa | 2306 | ACUGUAUCCUGUU | 2396 |
| | UfugcuauugcaL96 | | ccuCfuUfuacaasgsc | | UGCUAUUGCU | |
| AD-1397214.1 | gsusauc(Chd)ugUfUf | 2217 | VPusGfsagdTu(Tgn)cuu | 2307 | CUGUAUCCUGUUU | 2397 |
| | UfgcuauugcuaL96 | | uagGfcAfgcaausgsu | | GCUAUUGCUU | |
| AD-1397215.1 | usgsauu(Uhd)caAfCfC | 2218 | VPusCfsugdAg(Tgn)uuc | 2308 | CAUGAUUUCAACC | 2398 |
| | facauuugcuaL96 | | uuuAfgGfcagcasasu | | ACAUUUGCUA | |
| AD-1397216.1 | usasugg(Ahd)caUfCf | 2219 | VPusUfsuadAc(Tgn)gua | 2309 | AAUAUGGACAUCU | 2399 |
| | UfgguugcuuuaL96 | | cccAfaAfccagasasg | | GGUUGCUUUG | |
| AD-1397217.1 | asusgga(Chd)auCfUfG | 2220 | VPusdCscudTudAacugd | 2310 | AUAUGGACAUCUG | 2400 |
| | fguugcuuugaL96 | | TaCfccaaaccsasg | | GUUGCUUUGG | |
| AD-1397218.1 | ascsuuc(Uhd)gaUfUfU | 2221 | VPusUfsgcdCu(Tgn)uaa | 2311 | AAACUUCUGAUUU | 2401 |
| | fcucuucagcaL96 | | cugUfaCfccaaascsc | | CUCUUCAGCU | |
| AD-1397219.1 | csusucu(Ghd)auUfUf | 2222 | VPusdTscudCudAaccad | 2312 | AACUUCUGAUUUC | 2402 |
| | CfucuucagcuaL96 | | CcAfccaaaucsusa | | UCUUCAGCUU | |
| AD-1397220.1 | csusgau(Uhd)ucUfCf | 2223 | VPusGfsaadAc(Tgn)guu | 2313 | UUCUGAUUUCUCU | 2403 |
| | UfucagcuuugaL96 | | ggcAfgUfaaugasgsg | | UCAGCUUUGA | |
| AD-1397221.1 | usgsauu(Uhd)cuCfUf | 2224 | VPusdCsgadAadCuguud | 2314 | UCUGAUUUCUCUU | 2404 |
| | UfcagcuuugaaL96 | | GgCfaguaaugsasg | | CAGCUUUGAA | |
| AD-1397222.1 | gsasuuu(Chd)ucUfUf | 2225 | VPusdAsgcdCgdAaacud | 2315 | CUGAUUUCUCUUC | 2405 |
| | CfagcuuugaaaL96 | | GuUfggcaguasasu | | AGCUUUGAAA | |
| AD-1397223.1 | ascsuug(Chd)aaGfUfC | 2226 | VPusAfsgadAc(Tgn)uca | 2316 | GCACUUGCAAGUC | 2406 |
| | fccaugauuuaL96 | | ggaAfgAfggaacscsg | | CCAUGAUUUC | |
| AD-1397224.1 | csusugc(Ahd)agUfCfC | 2227 | VPusdAsagdAadCuucad | 2317 | CACUUGCAAGUCC | 2407 |
| | fcaugauuucaL96 | | GgAfagaggaascsc | | CAUGAUUUCU | |
| AD-1397225.1 | usgscaa(Ghd)ucCfCfA | 2228 | VPusdCsaadGadAcuucd | 2318 | CUUGCAAGUCCCA | 2408 |
| | fugauuucuuaL96 | | AgGfaagaggasasc | | UGAUUUCUUC | |
| AD-1397226.1 | csasagu(Chd)ccAfUfG | 2229 | VPusdAscadAgdAacuud | 2319 | UGCAAGUCCCAUG | 2409 |
| | fauuucuucgaL96 | | CaGfgaagaggsasa | | AUUUCUUCGG | |
| AD-1397227.1 | asgsucc(Chd)auGfAfU | 2230 | VPusdCsacdAadGaacud | 2320 | CAAGUCCCAUGAU | 2410 |
| | fuucuucgguaL96 | | TcAfggaagagsgsa | | UUCUUCGGUA | |
| AD-1397228.1 | gsusccc(Ahd)ugAfUf | 2231 | VPusdGscadCadAgaacd | 2321 | AAGUCCCAUGAUU | 2411 |
| | UfucuucgguaaL96 | | TuCfaggaagasgsg | | UCUUCGGUAA | |
| AD-1397229.1 | uscscca(Uhd)gaUfUfU | 2232 | VPusAfsaadCc(Agn)uga | 2322 | AGUCCCAUGAUUU | 2412 |
| | fcuucgguaaaL96 | | ucuUfaGfgcuggscsc | | CUUCGGUAAU | |
| AD-1397230.1 | cscscau(Ghd)auUfUfC | 2233 | VPusdCsuadAadCcaugd | 2323 | GUCCCAUGAUUUC | 2413 |
| | fuucgguaauaL96 | | AuCfuuaggcusgsg | | UUCGGUAAUU | |
| AD-1397231.1 | cscsaug(Ahd)uuUfCf | 2234 | VPusdCscudAadAccaud | 2324 | UCCCAUGAUUUCU | 2414 |
| | UfucgguaauuaL96 | | GaUfcuuaggcsusg | | UCGGUAAUUC | |
| AD-1397232.1 | asgsgga(Chd)auGfAf | 2235 | VPusdAsaudTudAucugd | 2325 | GGAGGGACAUGAA | 2415 |
| | AfaucaucuuaaL96 | | CcAfgcacugasusc | | AUCAUCUUAG | |
| AD-1397233.1 | gsgsgac(Ahd)ugAfAf | 2236 | VPusUfsaadGa(Tgn)cac | 2326 | GAGGGACAUGAAA | 2416 |
| | AfucaucuuagaL96 | | aagCfcAfgcgugscsc | | UCAUCUUAGC | |
| AD-1397234.1 | gsgsaca(Uhd)gaAfAfU | 2237 | VPusdAsgudAudAuccud | 2327 | AGGGACAUGAAAU | 2417 |
| | fcaucuuagcaL96 | | AuCfuagcccascsc | | CAUCUUAGCU | |
| AD-1397235.1 | gsascau(Ghd)aaAfUfC | 2238 | VPusdCsagdTadTauccdT | 2328 | GGGACAUGAAAUC | 2418 |
| | faucuuagcuaL96 | | aUfcuagcccsasc | | AUCUUAGCUU | |
| AD-1397236.1 | ascsaug(Ahd)aaUfCfA | 2239 | VPusAfsuadCa(G2p)uau | 2329 | GGACAUGAAAUCA | 2419 |
| | fucuuagcuuaL96 | | aucCfuAfucuagscsc | | UCUUAGCUUA | |
| AD-1397237.1 | asusgaa(Ahd)ucAfUfC | 2240 | VPusdCsaudAcdAguaud | 2330 | ACAUGAAAUCAUC | 2420 |
| | fuuagcuuagaL96 | | AuCfcuaucuasgsc | | UUAGCUUAGC | |
| AD-1397238.1 | gsasaau(Chd)auCfUfU | 2241 | VPusdGsaadCudAuugad | 2331 | AUGAAAUCAUCUU | 2421 |
| | fagcuuagcuaL96 | | TaAfagugaguscsa | | AGCUUAGCUU | |
| AD-1397239.1 | asasauc(Ahd)ucUfUfA | 2242 | VPusGfsgadAc(Tgn)auu | 2332 | UGAAAUCAUCUUA | 2422 |
| | fgcuuagcuuaL96 | | gauAfaAfgugagsusc | | GCUUAGCUUU | |
| AD-1397240.1 | gsusgaa(Uhd)guCfUf | 2243 | VPusUfsggdAa(C2p)uau | 2333 | CUGUGAAUGUCUA | 2423 |
| | AfuauaguguaaL96 | | ugaUfaAfagugasgsu | | UAUAGUGUAU | |
| AD-1397241.1 | asasugu(Chd)uaUfAf | 2244 | VPusAfsugdGa(Agn)cua | 2334 | UGAAUGUCUAUAU | 2424 |
| | UfaguguauugaL96 | | uugAfuAfaagugsasg | | AGUGUAUUGU | |
| AD-1397242.1 | usgsucu(Ahd)uaUfAf | 2245 | VPusAfsaudGg(Agn)acu | 2335 | AAUGUCUAUAUAG | 2425 |
| | GfuguauugugaL96 | | auuGfaUfaaagusgsa | | UGUAUUGUGU | |
| AD-1397243.1 | gsuscua(Uhd)auAfGf | 2246 | VPusdGsucdAadTuuaad | 2336 | AUGUCUAUAUAGU | 2426 |
| | UfguauuguguaL96 | | AuGfgaacuaususg | | GUAUUGUGUG | |
| AD-1397244.1 | uscsuau(Ahd)uaGfUf | 2247 | VPusAfsaadCa(G2p)gau | 2337 | UGUCUAUAUAGUG | 2427 |
| | GfuauugugugaL96 | | acaGfuCfucaccsasc | | UAUUGUGUGU | |
| AD-1397245.1 | usasuau(Ahd)guGfUf | 2248 | VPusdCsaadAcdAggaud | 2338 | UCUAUAUAGUGUA | 2428 |
| | AfuuguguguuaL96 | | AcAfgucucacscsa | | UUGUGUGUUU | |
| AD-1397246.1 | asusaua(Ghd)ugUfAf | 2249 | VPusdGscadAadCaggad | 2339 | CUAUAUAGUGUAU | 2429 |
| | UfuguguguuuaL96 | | TaCfagucucascsc | | UGUGUGUUUU | |
| AD-1397247.1 | csasaau(Ghd)auUfUfA | 2250 | VPusdAsgcdAadAcaggd | 2340 | AACAAAUGAUUUA | 2430 |
| | fcacugacugaL96 | | AuAfcagucucsasc | | CACUGACUGU | |
| AD-1397248.1 | asasuga(Uhd)uuAfCf | 2251 | VPusdTsagdCadAacagd | 2341 | CAAAUGAUUUACA | 2431 |
| | AfcugacuguuaL96 | | GaUfacagucuscsa | | CUGACUGUUG | |
| AD-1397249.1 | gsasaau(Ahd)aaGfUfU | 2252 | VPusdCsaadTadGcaaad | 2342 | UGGAAAUAAAGUU | 2432 |
| | fauuacucugaL96 | | CaGfgauacagsusc | | AUUACUCUGA | |

TABLE 20
Unmodified Sense and Antisense Strand Sequences of MAPT dsRNA Agents-Screen 7

| | | | Range in | | SEQ | Range in |
|---|---|---|---|---|---|---|
| | Sense Sequence | SEQ ID | NM_ | Antisense Sequence | ID | NM_ |
| Duplex Name | 5’ to 3’ | NO: | 005910.6 | 5’ to 3’ | NO: | 005910.6 |
| AD-1397070.2 | ACGUGACCCAAGC | 2433 | 512-532 | UCAUGCGAGCUT | 2521 | 510-532 |
| | UCGCAUGA | | | GGGUCACGUGA | | |
| AD-1397071.2 | CGUGACCCAAGCU | 2434 | 513-533 | UCCATGCGAGCU | 2522 | 511-533 |
| | CGCAUGGA | | | UGGGUCACGUG | | |
| AD-1397072.2 | GUGACCCAAGCUC | 2435 | 514-534 | UACCAUGCGAGC | 2523 | 512-534 |
| | GCAUGGUA | | | UUGGGUCACGU | | |
| AD-1397073.2 | UGACCCAAGCUCG | 2436 | 515-535 | UGACCATGCGAG | 2524 | 513-535 |
| | CAUGGUCA | | | CUUGGGUCACG | | |
| AD-1397074.2 | GACCCAAGCUCGC | 2437 | 516-536 | UUGACCAUGCGA | 2525 | 514-536 |
| | AUGGUCAA | | | GCUUGGGUCAC | | |
| AD-1397075.2 | ACCCAAGCUCGCA | 2438 | 517-537 | UCUGACCAUGCG | 2526 | 515-537 |
| | UGGUCAGA | | | AGCUUGGGUCA | | |
| AD-1397076.2 | CCCAAGCUCGCAU | 2439 | 518-538 | UACUGACCAUGC | 2527 | 516-538 |
| | GGUCAGUA | | | GAGCUUGGGUC | | |
| AD-1397077.2 | CCAAGCUCGCAUG | 2440 | 519-539 | UUACTGACCAUG | 2528 | 517-539 |
| | GUCAGUAA | | | CGAGCUUGGGU | | |
| AD-1397078.2 | CAAGCUCGCAUGG | 2441 | 520-540 | UUUACUGACCAU | 2529 | 518-540 |
| | UCAGUAAA | | | GCGAGCUUGGG | | |
| AD-1397250.1 | AAGCUCGCAUGGU | 2442 | 521-541 | UUUUACTGACCA | 2530 | 519-541 |
| | CAGUAAAA | | | UGCGAGCUUGG | | |
| AD-1397251.1 | AGCUCGCAUGGUC | 2443 | 522-542 | UUUUTACUGACC | 2531 | 520-542 |
| | AGUAAAAA | | | AUGCGAGCUUG | | |
| AD-1397252.1 | GCUCGCAUGGUCA | 2444 | 523-543 | UCUUTUACUGAC | 2532 | 521-543 |
| | GUAAAAGA | | | CAUGCGAGCUU | | |
| AD-1397253.1 | CUCGCAUGGUCAG | 2445 | 524-544 | UGCUTUTACUGA | 2533 | 522-544 |
| | UAAAAGCA | | | CCAUGCGAGCU | | |
| AD-1397254.1 | UCGCAUGGUCAGU | 2446 | 525-545 | UUGCTUTUACUG | 2534 | 523-545 |
| | AAAAGCAA | | | ACCAUGCGAGC | | |
| AD-1397255.1 | CGCAUGGUCAGUA | 2447 | 526-546 | UUUGCUTUUACU | 2535 | 524-546 |
| | AAAGCAAA | | | GACCAUGCGAG | | |
| AD-1397256.1 | GCAUGGUCAGUA | 2448 | 527-547 | UUUUGCTUUUAC | 2536 | 525-547 |
| | AAAGCAAAA | | | UGACCAUGCGA | | |
| AD-1397257.1 | CAUGGUCAGUAA | 2449 | 528-548 | UCUUTGCUUUUA | 2537 | 526-548 |
| | AAGCAAAGA | | | CUGACCAUGCG | | |
| AD-1397258.1 | AUGGUCAGUAAA | 2450 | 529-549 | UUCUTUGCUUUU | 2538 | 527-549 |
| | AGCAAAGAA | | | ACUGACCAUGC | | |
| AD-1397259.1 | UGGUCAGUAAAA | 2451 | 530-550 | UGUCTUTGCUUU | 2539 | 528-550 |
| | GCAAAGACA | | | UACUGACCAUG | | |
| AD-1397260.1 | GGUCAGUAAAAG | 2452 | 531-551 | UCGUCUTUGCUU | 2540 | 529-551 |
| | CAAAGACGA | | | UUACUGACCAU | | |
| AD-1397261.1 | GUCAGUAAAAGC | 2453 | 532-552 | UCCGTCTUUGCTU | 2541 | 530-552 |
| | AAAGACGGA | | | UUACUGACCA | | |
| AD-1397262.1 | UCAGUAAAAGCA | 2454 | 533-553 | UCCCGUCUUUGC | 2542 | 531-553 |
| | AAGACGGGA | | | UUUUACUGACC | | |
| AD-1397263.1 | CAGUAAAAGCAA | 2455 | 534-554 | UTCCCGTCUUUGC | 2543 | 532-554 |
| | AGACGGGAA | | | UUUUACUGAC | | |
| AD-1397264.1 | AGUAAAAGCAAA | 2456 | 535-555 | UGUCCCGUCUUU | 2544 | 533-555 |
| | GACGGGACA | | | GCUUUUACUGA | | |
| AD-1397265.1 | GUAAAAGCAAAG | 2457 | 536-556 | UAGUCCCGUCUU | 2545 | 534-556 |
| | ACGGGACUA | | | UGCUUUUACUG | | |
| AD-1397266.1 | AUAAUAUCAAAC | 2458 | 1034-1054 | UCGGGACGUGUT | 2546 | 1032-1054 |
| | ACGUCCCGA | | | UGAUAUUAUCC | | |
| AD-1397267.1 | UAAUAUCAAACAC | 2459 | 1035-1055 | UCCGGGACGUGU | 2547 | 1033-1055 |
| | GUCCCGGA | | | UUGAUAUUAUC | | |
| AD-1397268.1 | AAUAUCAAACACG | 2460 | 1036-1056 | UCCCGGGACGUG | 2548 | 1034-1056 |
| | UCCCGGGA | | | UUUGAUAUUAU | | |
| AD-1397269.1 | AUAUCAAACACGU | 2461 | 1037-1057 | UUCCCGGGACGU | 2549 | 1035-1057 |
| | CCCGGGAA | | | GUUUGAUAUUA | | |
| AD-1397270.1 | UAUCAAACACGUC | 2462 | 1038-1058 | UCUCCCGGGACG | 2550 | 1036-1058 |
| | CCGGGAGA | | | UGUUUGAUAUU | | |
| AD-1397271.1 | AUCAAACACGUCC | 2463 | 1039-1059 | UCCUCCCGGGAC | 2551 | 1037-1059 |
| | CGGGAGGA | | | GUGUUUGAUAU | | |
| AD-1397272.1 | UCAAACACGUCCC | 2464 | 1040-1060 | UGCCTCCCGGGAC | 2552 | 1038-1060 |
| | GGGAGGCA | | | GUGUUUGAUA | | |
| AD-1397273.1 | CAAACACGUCCCG | 2465 | 1041-1061 | UCGCCUCCCGGG | 2553 | 1039-1061 |
| | GGAGGCGA | | | ACGUGUUUGAU | | |
| AD-1397274.1 | AAACACGUCCCGG | 2466 | 1042-1062 | UCCGCCTCCCGGG | 2554 | 1040-1062 |
| | GAGGCGGA | | | ACGUGUUUGA | | |
| AD-1397275.1 | AACACGUCCCGGG | 2467 | 1043-1063 | UGCCGCCUCCCG | 2555 | 1041-1063 |
| | AGGCGGCA | | | GGACGUGUUUG | | |
| AD-1397276.1 | ACACGUCCCGGGA | 2468 | 1044-1064 | UUGCCGCCUCCC | 2556 | 1042-1064 |
| | GGCGGCAA | | | GGGACGUGUUU | | |
| AD-1397277.1 | CACGUCCCGGGAG | 2469 | 1045-1065 | UCUGCCGCCUCCC | 2557 | 1043-1065 |
| | GCGGCAGA | | | GGGACGUGUU | | |
| AD-1397278.1 | ACGUCCCGGGAGG | 2470 | 1046-1066 | UACUGCCGCCUC | 2558 | 1044-1066 |
| | CGGCAGUA | | | CCGGGACGUGU | | |
| AD-1397279.1 | CGUCCCGGGAGGC | 2471 | 1047-1067 | UCACTGCCGCCUC | 2559 | 1045-1067 |
| | GGCAGUGA | | | CCGGGACGUG | | |
| AD-1397280.1 | GUCCCGGGAGGCG | 2472 | 1048-1068 | UACACUGCCGCC | 2560 | 1046-1068 |
| | GCAGUGUA | | | UCCCGGGACGU | | |
| AD-1397281.1 | UCCCGGGAGGCGG | 2473 | 1049-1069 | UCACACTGCCGCC | 2561 | 1047-1069 |
| | CAGUGUGA | | | UCCCGGGACG | | |
| AD-1397282.1 | CCCGGGAGGCGGC | 2474 | 1050-1070 | UGCACACUGCCG | 2562 | 1048-1070 |
| | AGUGUGCA | | | CCUCCCGGGAC | | |
| AD-1397283.1 | CCGGGAGGCGGCA | 2475 | 1051-1071 | UUGCACACUGCC | 2563 | 1049-1071 |
| | GUGUGCAA | | | GCCUCCCGGGA | | |
| AD-1397284.1 | CGGGAGGCGGCAG | 2476 | 1052-1072 | UUUGCACACUGC | 2564 | 1050-1072 |
| | UGUGCAAA | | | CGCCUCCCGGG | | |
| AD-1397285.1 | GGGAGGCGGCAG | 2477 | 1053-1073 | UUUUGCACACUG | 2565 | 1051-1073 |
| | UGUGCAAAA | | | CCGCCUCCCGG | | |
| AD-1397286.1 | GGAGGCGGCAGU | 2478 | 1054-1074 | UAUUTGCACACU | 2566 | 1052-1074 |
| | GUGCAAAUA | | | GCCGCCUCCCG | | |
| AD-1397287.1 | CAGUGUGCAAAU | 2479 | 1062-1082 | UUGUAGACUAUU | 2567 | 1060-1082 |
| | AGUCUACAA | | | UGCACACUGCC | | |
| AD-1397079.2 | AGUGUGCAAAUA | 2480 | 1063-1083 | UUUGTAGACUAU | 2568 | 1061-1083 |
| | GUCUACAAA | | | UUGCACACUGC | | |
| AD-1397288.1 | GUGUGCAAAUAG | 2481 | 1064-1084 | UUUUGUAGACUA | 2569 | 1062-1084 |
| | UCUACAAAA | | | UUUGCACACUG | | |
| AD-1397289.1 | UGUGCAAAUAGU | 2482 | 1065-1085 | UGUUTGTAGACU | 2570 | 1063-1085 |
| | CUACAAACA | | | AUUUGCACACU | | |
| AD-1397290.1 | GUGCAAAUAGUC | 2483 | 1066-1086 | UGGUTUGUAGAC | 2571 | 1064-1086 |
| | UACAAACCA | | | UAUUUGCACAC | | |
| AD-1397080.2 | UGCAAAUAGUCU | 2484 | 1067-1087 | UUGGTUTGUAGA | 2572 | 1065-1087 |
| | ACAAACCAA | | | CUAUUUGCACA | | |
| AD-1397291.1 | GCAAAUAGUCUAC | 2485 | 1068-1088 | UCUGGUTUGUAG | 2573 | 1066-1088 |
| | AAACCAGA | | | ACUAUUUGCAC | | |
| AD-1397292.1 | CAAAUAGUCUACA | 2486 | 1069-1089 | UACUGGTUUGUA | 2574 | 1067-1089 |
| | AACCAGUA | | | GACUAUUUGCA | | |
| AD-1397293.1 | AAAUAGUCUACA | 2487 | 1070-1090 | UAACTGGUUUGU | 2575 | 1068-1090 |
| | AACCAGUUA | | | AGACUAUUUGC | | |
| AD-1397294.1 | AAUAGUCUACAA | 2488 | 1071-1091 | UCAACUGGUUUG | 2576 | 1069-1091 |
| | ACCAGUUGA | | | UAGACUAUUUG | | |
| AD-1397081.2 | AUAGUCUACAAAC | 2489 | 1072-1092 | UUCAACTGGUUU | 2577 | 1070-1092 |
| | CAGUUGAA | | | GUAGACUAUUU | | |
| AD-1397295.1 | UAGUCUACAAACC | 2490 | 1073-1093 | UGUCAACUGGUT | 2578 | 1071-1093 |
| | AGUUGACA | | | UGUAGACUAUU | | |
| AD-1397082.2 | AGUCUACAAACCA | 2491 | 1074-1094 | UGGUCAACUGGU | 2579 | 1072-1094 |
| | GUUGACCA | | | UUGUAGACUAU | | |
| AD-1397083.2 | GUCUACAAACCAG | 2492 | 1075-1095 | UAGGTCAACUGG | 2580 | 1073-1095 |
| | UUGACCUA | | | UUUGUAGACUA | | |
| AD-1397296.1 | UCUACAAACCAGU | 2493 | 1076-1096 | UCAGGUCAACUG | 2581 | 1074-1096 |
| | UGACCUGA | | | GUUUGUAGACU | | |
| AD-1397297.1 | CUACAAACCAGUU | 2494 | 1077-1097 | UUCAGGTCAACU | 2582 | 1075-1097 |
| | GACCUGAA | | | GGUUUGUAGAC | | |
| AD-1397298.1 | UACAAACCAGUUG | 2495 | 1078-1098 | UCUCAGGUCAAC | 2583 | 1076-1098 |
| | ACCUGAGA | | | UGGUUUGUAGA | | |
| AD-1397299.1 | ACAAACCAGUUGA | 2496 | 1079-1099 | UGCUCAGGUCAA | 2584 | 1077-1099 |
| | CCUGAGCA | | | CUGGUUUGUAG | | |
| AD-1397300.1 | CAAACCAGUUGAC | 2497 | 1080-1100 | UUGCTCAGGUCA | 2585 | 1078-1100 |
| | CUGAGCAA | | | ACUGGUUUGUA | | |
| AD-1397301.1 | AAACCAGUUGACC | 2498 | 1081-1101 | UUUGCUCAGGUC | 2586 | 1079-1101 |
| | UGAGCAAA | | | AACUGGUUUGU | | |
| AD-1397302.1 | AACCAGUUGACCU | 2499 | 1082-1102 | UCUUGCTCAGGU | 2587 | 1080-1102 |
| | GAGCAAGA | | | CAACUGGUUUG | | |
| AD-1397303.1 | CAACAUCCAUCAU | 2500 | 1128-1148 | UCUGGUTUAUGA | 2588 | 1126-1148 |
| | AAACCAGA | | | UGGAUGUUGCC | | |
| AD-1397087.2 | AACAUCCAUCAUA | 2501 | 1129-1149 | UCCUGGTUUAUG | 2589 | 1127-1149 |
| | AACCAGGA | | | AUGGAUGUUGC | | |
| AD-1397304.1 | ACAUCCAUCAUAA | 2502 | 1130-1150 | UUCCTGGUUUAU | 2590 | 1128-1150 |
| | ACCAGGAA | | | GAUGGAUGUUG | | |
| AD-1397305.1 | CAUCCAUCAUAAA | 2503 | 1131-1151 | UCUCCUGGUUUA | 2591 | 1129-1151 |
| | CCAGGAGA | | | UGAUGGAUGUU | | |
| AD-1397306.1 | AUCCAUCAUAAAC | 2504 | 1132-1152 | UCCUCCTGGUUTA | 2592 | 1130-1152 |
| | CAGGAGGA | | | UGAUGGAUGU | | |
| AD-1397307.1 | UCCAUCAUAAACC | 2505 | 1133-1153 | UACCTCCUGGUU | 2593 | 1131-1153 |
| | AGGAGGUA | | | UAUGAUGGAUG | | |
| AD-1397308.1 | CCAUCAUAAACCA | 2506 | 1134-1154 | UCACCUCCUGGT | 2594 | 1132-1154 |
| | GGAGGUGA | | | UUAUGAUGGAU | | |
| AD-1397309.1 | CAUCAUAAACCAG | 2507 | 1135-1155 | UCCACCTCCUGGU | 2595 | 1133-1155 |
| | GAGGUGGA | | | UUAUGAUGGA | | |
| AD-1397310.1 | AUCAUAAACCAGG | 2508 | 1136-1156 | UGCCACCUCCUG | 2596 | 1134-1156 |
| | AGGUGGCA | | | GUUUAUGAUGG | | |
| AD-1397311.1 | UCAUAAACCAGGA | 2509 | 1137-1157 | UGGCCACCUCCU | 2597 | 1135-1157 |
| | GGUGGCCA | | | GGUUUAUGAUG | | |
| AD-1397312.1 | CAUAAACCAGGAG | 2510 | 1138-1158 | UUGGCCACCUCC | 2598 | 1136-1158 |
| | GUGGCCAA | | | UGGUUUAUGAU | | |
| AD-1397313.1 | AUAAACCAGGAG | 2511 | 1139-1159 | UCUGGCCACCUC | 2599 | 1137-1159 |
| | GUGGCCAGA | | | CUGGUUUAUGA | | |
| AD-1397314.1 | UAAACCAGGAGG | 2512 | 1140-1160 | UCCUGGCCACCU | 2600 | 1138-1160 |
| | UGGCCAGGA | | | CCUGGUUUAUG | | |
| AD-1397315.1 | AAACCAGGAGGU | 2513 | 1141-1161 | UACCTGGCCACCU | 2601 | 1139-1161 |
| | GGCCAGGUA | | | CCUGGUUUAU | | |
| AD-1397316.1 | AACCAGGAGGUG | 2514 | 1142-1162 | UCACCUGGCCAC | 2602 | 1140-1162 |
| | GCCAGGUGA | | | CUCCUGGUUUA | | |
| AD-1397317.1 | ACCAGGAGGUGGC | 2515 | 1143-1163 | UCCACCTGGCCAC | 2603 | 1141-1163 |
| | CAGGUGGA | | | CUCCUGGUUU | | |
| AD-1397318.1 | CCAGGAGGUGGCC | 2516 | 1144-1164 | UUCCACCUGGCC | 2604 | 1142-1164 |
| | AGGUGGAA | | | ACCUCCUGGUU | | |
| AD-1397319.1 | CAGGAGGUGGCCA | 2517 | 1145-1165 | UUUCCACCUGGC | 2605 | 1143-1165 |
| | GGUGGAAA | | | CACCUCCUGGU | | |
| AD-1397320.1 | AGGAGGUGGCCA | 2518 | 1146-1166 | UCUUCCACCUGG | 2606 | 1144-1166 |
| | GGUGGAAGA | | | CCACCUCCUGG | | |
| AD-1397321.1 | GGAGGUGGCCAG | 2519 | 1147-1167 | UACUTCCACCUG | 2607 | 1145-1167 |
| | GUGGAAGUA | | | GCCACCUCCUG | | |
| AD-1397322.1 | GAGGUGGCCAGG | 2520 | 1148-1168 | UUACTUCCACCU | 2608 | 1146-1168 |
| | UGGAAGUAA | | | GGCCACCUCCU | | |

TABLE 21
Modified Sense and Antisense Strand Sequences of MAPT dsRNA Agents- Screen 7

| | | SEQ | | SEQ | mRNA Target | SEQ |
|---|---|---|---|---|---|---|
| | Sense Sequence 5′ to | ID | Antisense Sequence 5′ | ID | Sequence | ID |
| Duplex ID | 3′ | NO: | to 3′ | NO: | 5′ to 3′ | NO: |
| AD-1397070.2 | ascsgug(Ahd)ccCfAfA | 2609 | VPusdCsaudGcdGagcud | 2697 | UCACGUGACCCAA | 2785 |
| | fgcucgcaugaL96 | | TgGfgucacgusgsa | | GCUCGCAUGG | |
| AD-1397071.2 | csgsuga(Chd)ccAfAfG | 2610 | VPusCfscadTg(C2p)gagc | 2698 | CACGUGACCCAAG | 2786 |
| | fcucgcauggaL96 | | uuGfgGfucacgsusg | | CUCGCAUGGU | |
| AD-1397072.2 | gsusgac(Chd)caAfGfCf | 2611 | VPusAfsccdAu(G2p)cga | 2699 | ACGUGACCCAAGC | 2787 |
| | ucgcaugguaL96 | | gcuUfgGfgucacsgsu | | UCGCAUGGUC | |
| AD-1397073.2 | usgsacc(Chd)aaGfCfUf | 2612 | VPusdGsacdCadTgcgad | 2700 | CGUGACCCAAGCU | 2788 |
| | cgcauggucaL96 | | GcUfugggucascsg | | CGCAUGGUCA | |
| AD-1397074.2 | gsasccc(Ahd)agCfUfCf | 2613 | VPusUfsgadCc(Agn)ugc | 2701 | GUGACCCAAGCUC | 2789 |
| | gcauggucaaL96 | | gagCfuUfgggucsasc | | GCAUGGUCAG | |
| AD-1397075.2 | ascscca(Ahd)gcUfCfGf | 2614 | VPusdCsugdAcdCaugcd | 2702 | UGACCCAAGCUCG | 2790 |
| | cauggucagaL96 | | GaGfcuuggguscsa | | CAUGGUCAGU | |
| AD-1397076.2 | cscscaa(Ghd)cuCfGfCf | 2615 | VPusAfscudGa(C2p)cau | 2703 | GACCCAAGCUCGC | 2791 |
| | auggucaguaL96 | | gcgAfgCfuugggsusc | | AUGGUCAGUA | |
| AD-1397077.2 | cscsaag(Chd)ucGfCfAf | 2616 | VPusUfsacdTg(Agn)cca | 2704 | ACCCAAGCUCGCA | 2792 |
| | uggucaguaaL96 | | ugcGfaGfcuuggsgsu | | UGGUCAGUAA | |
| AD-1397078.2 | csasagc(Uhd)cgCfAfUf | 2617 | VPusUfsuadCu(G2p)acc | 2705 | CCCAAGCUCGCAU | 2793 |
| | ggucaguaaaL96 | | augCfgAfgcuugsgsg | | GGUCAGUAAA | |
| AD-1397250.1 | asasgcu(Chd)gcAfUfG | 2618 | VPusUfsuudAc(Tgn)gac | 2706 | CCAAGCUCGCAUG | 2794 |
| | fgucaguaaaaL96 | | cauGfcGfagcuusgsg | | GUCAGUAAAA | |
| AD-1397251.1 | asgscuc(Ghd)caUfGfG | 2619 | VPusUfsuudTa(C2p)uga | 2707 | CAAGCUCGCAUGG | 2795 |
| | fucaguaaaaaL96 | | ccaUfgCfgagcususg | | UCAGUAAAAG | |
| AD-1397252.1 | gscsucg(Chd)auGfGfU | 2620 | VPusdCsuudTudAcugad | 2708 | AAGCUCGCAUGGU | 2796 |
| | fcaguaaaagaL96 | | CcAfugcgagcsusu | | CAGUAAAAGC | |
| AD-1397253.1 | csuscgc(Ahd)ugGfUfC | 2621 | VPusdGscudTudTacugd | 2709 | AGCUCGCAUGGUC | 2797 |
| | faguaaaagcaL96 | | AcCfaugcgagscsu | | AGUAAAAGCA | |
| AD-1397254.1 | uscsgca(Uhd)ggUfCfA | 2622 | VPusUfsgcdTu(Tgn)uac | 2710 | GCUCGCAUGGUCA | 2798 |
| | fguaaaagcaaL96 | | ugaCfcAfugcgasgsc | | GUAAAAGCAA | |
| AD-1397255.1 | csgscau(Ghd)guCfAfG | 2623 | VPusUfsugdCu(Tgn)uua | 2711 | CUCGCAUGGUCAG | 2799 |
| | fuaaaagcaaaL96 | | cugAfcCfaugcgsasg | | UAAAAGCAAA | |
| AD-1397256.1 | gscsaug(Ghd)ucAfGfU | 2624 | VPusUfsuudGc(Tgn)uuu | 2712 | UCGCAUGGUCAGU | 2800 |
| | faaaagcaaaaL96 | | acuGfaCfcaugcsgsa | | AAAAGCAAAG | |
| AD-1397257.1 | csasugg(Uhd)caGfUfA | 2625 | VPusCfsuudTg(C2p)uuu | 2713 | CGCAUGGUCAGUA | 2801 |
| | faaagcaaagaL96 | | uacUfgAfccaugscsg | | AAAGCAAAGA | |
| AD-1397258.1 | asusggu(Chd)agUfAfA | 2626 | VPusUfscudTu(G2p)cuu | 2714 | GCAUGGUCAGUAA | 2802 |
| | faagcaaagaaL96 | | uuaCfuGfaccausgsc | | AAGCAAAGAC | |
| AD-1397259.1 | usgsguc(Ahd)guAfAfA | 2627 | VPusGfsucdTu(Tgn)gcu | 2715 | CAUGGUCAGUAAA | 2803 |
| | fagcaaagacaL96 | | uuuAfcUfgaccasusg | | AGCAAAGACG | |
| AD-1397260.1 | gsgsuca(Ghd)uaAfAfA | 2628 | VPusCfsgudCu(Tgn)ugc | 2716 | AUGGUCAGUAAAA | 2804 |
| | fgcaaagacgaL96 | | uuuUfaCfugaccsasu | | GCAAAGACGG | |
| AD-1397261.1 | gsuscag(Uhd)aaAfAfG | 2629 | VPusdCscgdTcdTuugcd | 2717 | UGGUCAGUAAAAG | 2805 |
| | fcaaagacggaL96 | | TuUfuacugacscsa | | CAAAGACGGG | |
| AD-1397262.1 | uscsagu(Ahd)aaAfGfC | 2630 | VPusdCsccdGudCuuugd | 2718 | GGUCAGUAAAAGC | 2806 |
| | faaagacgggaL96 | | CuUfuuacugascsc | | AAAGACGGGA | |
| AD-1397263.1 | csasgua(Ahd)aaGfCfAf | 2631 | VPusdTsccdCgdTcuuud | 2719 | GUCAGUAAAAGCA | 2807 |
| | aagacgggaaL96 | | GcUfuuuacugsasc | | AAGACGGGAC | |
| AD-1397264.1 | asgsuaa(Ahd)agCfAfA | 2632 | VPusGfsucdCc(G2p)ucu | 2720 | UCAGUAAAAGCAA | 2808 |
| | fagacgggacaL96 | | uugCfuUfuuacusgsa | | AGACGGGACU | |
| AD-1397265.1 | gsusaaa(Ahd)gcAfAfA | 2633 | VPusAfsgudCc(C2p)guc | 2721 | CAGUAAAAGCAAA | 2809 |
| | fgacgggacuaL96 | | uuuGfcUfuuuacsusg | | GACGGGACUG | |
| AD-1397266.1 | asusaau(Ahd)ucAfAfA | 2634 | VPusdCsggdGadCgugud | 2722 | GGAUAAUAUCAAA | 2810 |
| | fcacgucccgaL96 | | TuGfauauuauscsc | | CACGUCCCGG | |
| AD-1397267.1 | usasaua(Uhd)caAfAfCf | 2635 | VPusCfscgdGg(Agn)cgu | 2723 | GAUAAUAUCAAAC | 2811 |
| | acgucccggaL96 | | guuUfgAfuauuasusc | | ACGUCCCGGG | |
| AD-1397268.1 | asasuau(Chd)aaAfCfAf | 2636 | VPusdCsccdGgdGacgud | 2724 | AUAAUAUCAAACA | 2812 |
| | cgucccgggaL96 | | GuUfugauauusasu | | CGUCCCGGGA | |
| AD-1397269.1 | asusauc(Ahd)aaCfAfCf | 2637 | VPusUfsccdCg(G2p)gac | 2725 | UAAUAUCAAACAC | 2813 |
| | gucccgggaaL96 | | gugUfuUfgauaususa | | GUCCCGGGAG | |
| AD-1397270.1 | usasuca(Ahd)acAfCfGf | 2638 | VPusdCsucdCcdGggacd | 2726 | AAUAUCAAACACG | 2814 |
| | ucccgggagaL96 | | GuGfuuugauasusu | | UCCCGGGAGG | |
| AD-1397271.1 | asuscaa(Ahd)caCfGfUf | 2639 | VPusdCscudCcdCgggad | 2727 | AUAUCAAACACGU | 2815 |
| | cccgggaggaL96 | | CgUfguuugausasu | | CCCGGGAGGC | |
| AD-1397272.1 | uscsaaa(Chd)acGfUfCf | 2640 | VPusGfsccdTc(C2p)cgg | 2728 | UAUCAAACACGUC | 2816 |
| | ccgggaggcaL96 | | gacGfuGfuuugasusa | | CCGGGAGGCG | |
| AD-1397273.1 | csasaac(Ahd)cgUfCfCf | 2641 | VPusCfsgcdCu(C2p)ccg | 2729 | AUCAAACACGUCC | 2817 |
| | cgggaggcgaL96 | | ggaCfgUfguuugsasu | | CGGGAGGCGG | |
| AD-1397274.1 | asasaca(Chd)guCfCfCf | 2642 | VPusCfscgdCc(Tgn)cccg | 2730 | UCAAACACGUCCC | 2818 |
| | gggaggcggaL96 | | ggAfcGfuguuusgsa | | GGGAGGCGGC | |
| AD-1397275.1 | asascac(Ghd)ucCfCfGf | 2643 | VPusGfsccdGc(C2p)ucc | 2731 | CAAACACGUCCCG | 2819 |
| | ggaggcggcaL96 | | cggGfaCfguguususg | | GGAGGCGGCA | |
| AD-1397276.1 | ascsacg(Uhd)ccCfGfGf | 2644 | VPusUfsgcdCg(C2p)cuc | 2732 | AAACACGUCCCGG | 2820 |
| | gaggcggcaaL96 | | ccgGfgAfcgugususu | | GAGGCGGCAG | |
| AD-1397277.1 | csascgu(Chd)ccGfGfGf | 2645 | VPusdCsugdCcdGccucd | 2733 | AACACGUCCCGGG | 2821 |
| | aggcggcagaL96 | | CcGfggacgugsusu | | AGGCGGCAGU | |
| AD-1397278.1 | ascsguc(Chd)cgGfGfA | 2646 | VPusAfscudGc(C2p)gcc | 2734 | ACACGUCCCGGGA | 2822 |
| | fggcggcaguaL96 | | uccCfgGfgacgusgsu | | GGCGGCAGUG | |
| AD-1397279.1 | csgsucc(Chd)ggGfAfG | 2647 | VPusCfsacdTg(C2p)cgcc | 2735 | CACGUCCCGGGAG | 2823 |
| | fgcggcagugaL96 | | ucCfcGfggacgsusg | | GCGGCAGUGU | |
| AD-1397280.1 | gsusccc(Ghd)ggAfGfG | 2648 | VPusAfscadCu(G2p)ccg | 2736 | ACGUCCCGGGAGG | 2824 |
| | fcggcaguguaL96 | | ccuCfcCfgggacsgsu | | CGGCAGUGUG | |
| AD-1397281.1 | uscsccg(Ghd)gaGfGfC | 2649 | VPusdCsacdAcdTgccgd | 2737 | CGUCCCGGGAGGC | 2825 |
| | fggcagugugaL96 | | CcUfcccgggascsg | | GGCAGUGUGC | |
| AD-1397282.1 | cscscgg(Ghd)agGfCfG | 2650 | VPusGfscadCa(C2p)ugc | 2738 | GUCCCGGGAGGCG | 2826 |
| | fgcagugugcaL96 | | cgcCfuCfccgggsasc | | GCAGUGUGCA | |
| AD-1397283.1 | cscsggg(Ahd)ggCfGfG | 2651 | VPusUfsgcdAc(Agn)cug | 2739 | UCCCGGGAGGCGG | 2827 |
| | fcagugugcaaL96 | | ccgCfcUfcccggsgsa | | CAGUGUGCAA | |
| AD-1397284.1 | csgsgga(Ghd)gcGfGfC | 2652 | VPusUfsugdCa(C2p)acu | 2740 | CCCGGGAGGCGGC | 2828 |
| | fagugugcaaaL96 | | gccGfcCfucccgsgsg | | AGUGUGCAAA | |
| AD-1397285.1 | gsgsgag(Ghd)cgGfCfA | 2653 | VPusUfsuudGc(Agn)cac | 2741 | CCGGGAGGCGGCA | 2829 |
| | fgugugcaaaaL96 | | ugcCfgCfcucccsgsg | | GUGUGCAAAU | |
| AD-1397286.1 | gsgsagg(Chd)ggCfAfG | 2654 | VPusAfsuudTg(C2p)aca | 2742 | CGGGAGGCGGCAG | 2830 |
| | fugugcaaauaL96 | | cugCfcGfccuccscsg | | UGUGCAAAUA | |
| AD-1397287.1 | csasgug(Uhd)gcAfAfA | 2655 | VPusUfsgudAg(Agn)cua | 2743 | GGCAGUGUGCAAA | 2831 |
| | fuagucuacaaL96 | | uuuGfcAfcacugscsc | | UAGUCUACAA | |
| AD-1397079.2 | asgsugu(Ghd)caAfAfU | 2656 | VPusUfsugdTa(G2p)acu | 2744 | GCAGUGUGCAAAU | 2832 |
| | fagucuacaaaL96 | | auuUfgCfacacusgsc | | AGUCUACAAA | |
| AD-1397288.1 | gsusgug(Chd)aaAfUfA | 2657 | VPusUfsuudGu(Agn)gac | 2745 | CAGUGUGCAAAUA | 2833 |
| | fgucuacaaaaL96 | | uauUfuGfcacacsusg | | GUCUACAAAC | |
| AD-1397289.1 | usgsugc(Ahd)aaUfAfG | 2658 | VPusGfsuudTg(Tgn)aga | 2746 | AGUGUGCAAAUAG | 2834 |
| | fucuacaaacaL96 | | cuaUfuUfgcacascsu | | UCUACAAACC | |
| AD-1397290.1 | gsusgca(Ahd)auAfGfU | 2659 | VPusGfsgudTu(G2p)uag | 2747 | GUGUGCAAAUAGU | 2835 |
| | fcuacaaaccaL96 | | acuAfuUfugcacsasc | | CUACAAACCA | |
| AD-1397080.2 | usgscaa(Ahd)uaGfUfC | 2660 | VPusUfsggdTu(Tgn)gua | 2748 | UGUGCAAAUAGUC | 2836 |
| | fuacaaaccaaL96 | | gacUfaUfuugcascsa | | UACAAACCAG | |
| AD-1397291.1 | gscsaaa(Uhd)agUfCfUf | 2661 | VPusdCsugdGudTuguad | 2749 | GUGCAAAUAGUCU | 2837 |
| | acaaaccagaL96 | | GaCfuauuugcsasc | | ACAAACCAGU | |
| AD-1397292.1 | csasaau(Ahd)guCfUfA | 2662 | VPusAfscudGg(Tgn)uug | 2750 | UGCAAAUAGUCUA | 2838 |
| | fcaaaccaguaL96 | | uagAfcUfauuugscsa | | CAAACCAGUU | |
| AD-1397293.1 | asasaua(Ghd)ucUfAfCf | 2663 | VPusAfsacdTg(G2p)uuu | 2751 | GCAAAUAGUCUAC | 2839 |
| | aaaccaguuaL96 | | guaGfaCfuauuusgsc | | AAACCAGUUG | |
| AD-1397294.1 | asasuag(Uhd)cuAfCfA | 2664 | VPusdCsaadCudGguuud | 2752 | CAAAUAGUCUACA | 2840 |
| | faaccaguugaL96 | | GuAfgacuauususg | | AACCAGUUGA | |
| AD-1397081.2 | asusagu(Chd)uaCfAfA | 2665 | VPusUfscadAc(Tgn)ggu | 2753 | AAAUAGUCUACAA | 2841 |
| | faccaguugaaL96 | | uugUfaGfacuaususu | | ACCAGUUGAC | |
| AD-1397295.1 | usasguc(Uhd)acAfAfA | 2666 | VPusdGsucdAadCuggud | 2754 | AAUAGUCUACAAA | 2842 |
| | fccaguugacaL96 | | TuGfuagacuasusu | | CCAGUUGACC | |
| AD-1397082.2 | asgsucu(Ahd)caAfAfC | 2667 | VPusGfsgudCa(Agn)cug | 2755 | AUAGUCUACAAAC | 2843 |
| | fcaguugaccaL96 | | guuUfgUfagacusasu | | CAGUUGACCU | |
| AD-1397083.2 | gsuscua(Chd)aaAfCfCf | 2668 | VPusAfsggdTc(Agn)acu | 2756 | UAGUCUACAAACC | 2844 |
| | aguugaccuaL96 | | gguUfuGfuagacsusa | | AGUUGACCUG | |
| AD-1397296.1 | uscsuac(Ahd)aaCfCfAf | 2669 | VPusCfsagdGu(C2p)aac | 2757 | AGUCUACAAACCA | 2845 |
| | guugaccugaL96 | | uggUfuUfguagascsu | | GUUGACCUGA | |
| AD-1397297.1 | csusaca(Ahd)acCfAfGf | 2670 | VPusUfscadGg(Tgn)caac | 2758 | GUCUACAAACCAG | 2846 |
| | uugaccugaaL96 | | ugGfuUfuguagsasc | | UUGACCUGAG | |
| AD-1397298.1 | usascaa(Ahd)ccAfGfUf | 2671 | VPusCfsucdAg(G2p)uca | 2759 | UCUACAAACCAGU | 2847 |
| | ugaccugagaL96 | | acuGfgUfuuguasgsa | | UGACCUGAGC | |
| AD-1397299.1 | ascsaaa(Chd)caGfUfUf | 2672 | VPusGfscudCa(G2p)guc | 2760 | CUACAAACCAGUU | 2848 |
| | gaccugagcaL96 | | aacUfgGfuuugusasg | | GACCUGAGCA | |
| AD-1397300.1 | csasaac(Chd)agUfUfGf | 2673 | VPusUfsgcdTc(Agn)ggu | 2761 | UACAAACCAGUUG | 2849 |
| | accugagcaaL96 | | caaCfuGfguuugsusa | | ACCUGAGCAA | |
| AD-1397301.1 | asasacc(Ahd)guUfGfA | 2674 | VPusUfsugdCu(C2p)agg | 2762 | ACAAACCAGUUGA | 2850 |
| | fccugagcaaaL96 | | ucaAfcUfgguuusgsu | | CCUGAGCAAG | |
| AD-1397302.1 | asascca(Ghd)uuGfAfCf | 2675 | VPusCfsuudGc(Tgn)cag | 2763 | CAAACCAGUUGAC | 2851 |
| | cugagcaagaL96 | | gucAfaCfugguususg | | CUGAGCAAGG | |
| AD-1397303.1 | csasaca(Uhd)ccAfUfCf | 2676 | VPusdCsugdGudTuaugd | 2764 | GGCAACAUCCAUC | 2852 |
| | auaaaccagaL96 | | AuGfgauguugscsc | | AUAAACCAGG | |
| AD-1397087.2 | asascau(Chd)caUfCfAf | 2677 | VPusCfscudGg(Tgn)uua | 2765 | GCAACAUCCAUCA | 2853 |
| | uaaaccaggaL96 | | ugaUfgGfauguusgsc | | UAAACCAGGA | |
| AD-1397304.1 | ascsauc(Chd)auCfAfUf | 2678 | VPusUfsccdTg(G2p)uuu | 2766 | CAACAUCCAUCAU | 2854 |
| | aaaccaggaaL96 | | augAfuGfgaugususg | | AAACCAGGAG | |
| AD-1397305.1 | csasucc(Ahd)ucAfUfA | 2679 | VPusCfsucdCu(G2p)guu | 2767 | AACAUCCAUCAUA | 2855 |
| | faaccaggagaL96 | | uauGfaUfggaugsusu | | AACCAGGAGG | |
| AD-1397306.1 | asuscca(Uhd)caUfAfAf | 2680 | VPusdCscudCcdTgguud | 2768 | ACAUCCAUCAUAA | 2856 |
| | accaggaggaL96 | | TaUfgauggausgsu | | ACCAGGAGGU | |
| AD-1397307.1 | uscscau(Chd)auAfAfA | 2681 | VPusAfsccdTc(C2p)ugg | 2769 | CAUCCAUCAUAAA | 2857 |
| | fccaggagguaL96 | | uuuAfuGfauggasusg | | CCAGGAGGUG | |
| AD-1397308.1 | cscsauc(Ahd)uaAfAfCf | 2682 | VPusdCsacdCudCcuggd | 2770 | AUCCAUCAUAAAC | 2858 |
| | caggaggugaL96 | | TuUfaugauggsasu | | CAGGAGGUGG | |
| AD-1397309.1 | csasuca(Uhd)aaAfCfCf | 2683 | VPusdCscadCcdTccugd | 2771 | UCCAUCAUAAACC | 2859 |
| | aggagguggaL96 | | GuUfuaugaugsgsa | | AGGAGGUGGC | |
| AD-1397310.1 | asuscau(Ahd)aaCfCfAf | 2684 | VPusGfsccdAc(C2p)ucc | 2772 | CCAUCAUAAACCA | 2860 |
| | ggagguggcaL96 | | uggUfuUfaugausgsg | | GGAGGUGGCC | |
| AD-1397311.1 | uscsaua(Ahd)acCfAfGf | 2685 | VPusGfsgcdCa(C2p)cuc | 2773 | CAUCAUAAACCAG | 2861 |
| | gagguggccaL96 | | cugGfuUfuaugasusg | | GAGGUGGCCA | |
| AD-1397312.1 | csasuaa(Ahd)ccAfGfGf | 2686 | VPusUfsggdCc(Agn)ccu | 2774 | AUCAUAAACCAGG | 2862 |
| | agguggccaaL96 | | ccuGfgUfuuaugsasu | | AGGUGGCCAG | |
| AD-1397313.1 | asusaaa(Chd)caGfGfAf | 2687 | VPusCfsugdGc(C2p)acc | 2775 | UCAUAAACCAGGA | 2863 |
| | gguggccagaL96 | | uccUfgGfuuuausgsa | | GGUGGCCAGG | |
| AD-1397314.1 | usasaac(Chd)agGfAfGf | 2688 | VPusCfscudGg(C2p)cac | 2776 | CAUAAACCAGGAG | 2864 |
| | guggccaggaL96 | | cucCfuGfguuuasusg | | GUGGCCAGGU | |
| AD-1397315.1 | asasacc(Ahd)ggAfGfG | 2689 | VPusAfsccdTg(G2p)ccac | 2777 | AUAAACCAGGAGG | 2865 |
| | fuggccagguaL96 | | cuCfcUfgguuusasu | | UGGCCAGGUG | |
| AD-1397316.1 | asascca(Ghd)gaGfGfUf | 2690 | VPusCfsacdCu(G2p)gcc | 2778 | UAAACCAGGAGGU | 2866 |
| | ggccaggugaL96 | | accUfcCfugguususa | | GGCCAGGUGG | |
| AD-1397317.1 | ascscag(Ghd)agGfUfG | 2691 | VPusdCscadCcdTggccd | 2779 | AAACCAGGAGGUG | 2867 |
| | fgccagguggaL96 | | AcCfuccuggususu | | GCCAGGUGGA | |
| AD-1397318.1 | cscsagg(Ahd)ggUfGfG | 2692 | VPusUfsccdAc(C2p)ugg | 2780 | AACCAGGAGGUGG | 2868 |
| | fccagguggaaL96 | | ccaCfcUfccuggsusu | | CCAGGUGGAA | |
| AD-1397319.1 | csasgga(Ghd)guGfGfC | 2693 | VPusUfsucdCa(C2p)cug | 2781 | ACCAGGAGGUGGC | 2869 |
| | fcagguggaaaL96 | | gccAfcCfuccugsgsu | | CAGGUGGAAG | |
| AD-1397320.1 | asgsgag(Ghd)ugGfCfC | 2694 | VPusCfsuudCc(Agn)ccu | 2782 | CCAGGAGGUGGCC | 2870 |
| | fagguggaagaL96 | | ggcCfaCfcuccusgsg | | AGGUGGAAGU | |
| AD-1397321.1 | gsgsagg(Uhd)ggCfCfA | 2695 | VPusAfscudTc(C2p)accu | 2783 | CAGGAGGUGGCCA | 2871 |
| | fgguggaaguaL96 | | ggCfcAfccuccsusg | | GGUGGAAGUA | |
| AD-1397322.1 | gsasggu(Ghd)gcCfAfG | 2696 | VPusUfsacdTu(C2p)cacc | 2784 | AGGAGGUGGCCAG | 2872 |
| | fguggaaguaaL96 | | ugGfcCfaccucscsu | | GUGGAAGUAA | |

TABLE 22
Unmodified Sense and Antisense Strand Sequences of MAPT dsRNA Agents- Screen 8

| | Sense Sequence | SEQ ID | Range in | Antisense Sequence | SEQ ID | Range in |
|---|---|---|---|---|---|---|
| Duplex Name | 5′ to 3′ | NO: | NM_005910.6 | 5′ to 3′ | NO: | NM_005910.6 |
| AD-1423242.1 | GCAGAUAAUUAAU | 2873 | 975-995 | UGCUTCTUAUUAAU | 2943 | 973-995 |
| | AAGAAGCA | | | UAUCUGCAC | | |
| AD-1423243.1 | CAGAUAAUUAAUA | 2874 | 976-996 | UAGCTUCUUAUTAA | 2944 | 974-996 |
| | AGAAGCUA | | | UUAUCUGCA | | |
| AD-1423244.1 | AGAUAAUUAAUAA | 2875 | 977-997 | UCAGCUTCUUATUA | 2945 | 975-997 |
| | GAAGCUGA | | | AUUAUCUGC | | |
| AD-1423245.1 | GAUAAUUAAUAAG | 2876 | 978-998 | UCCAGCTUCUUAUU | 2946 | 976-998 |
| | AAGCUGGA | | | AAUUAUCUG | | |
| AD-1423246.1 | AUAAUUAAUAAGA | 2877 | 979-999 | UTCCAGCUUCUTAU | 2947 | 977-999 |
| | AGCUGGAA | | | UAAUUAUCU | | |
| AD-1423247.1 | UAAUUAAUAAGAA | 2878 | 980-1000 | UAUCCAGCUUCTUA | 2948 | 978-1000 |
| | GCUGGAUA | | | UUAAUUAUC | | |
| AD-1423248.1 | AAUUAAUAAGAAG | 2879 | 981-1001 | UGAUCCAGCUUCU | 2949 | 979-1001 |
| | CUGGAUCA | | | UAUUAAUUAU | | |
| AD-1423249.1 | AUUAAUAAGAAGC | 2880 | 982-1002 | UAGATCCAGCUTCU | 2950 | 980-1002 |
| | UGGAUCUA | | | UAUUAAUUA | | |
| AD-1423250.1 | UUAAUAAGAAGCU | 2881 | 983-1003 | UAAGAUCCAGCTUC | 2951 | 981-1003 |
| | GGAUCUUA | | | UUAUUAAUU | | |
| AD-1423251.1 | UAAUAAGAAGCUG | 2882 | 984-1004 | UTAAGATCCAGCUU | 2952 | 982-1004 |
| | GAUCUUAA | | | CUUAUUAAU | | |
| AD-1423252.1 | AAUAAGAAGCUGG | 2883 | 985-1005 | UCUAAGAUCCAGC | 2953 | 983-1005 |
| | AUCUUAGA | | | UUCUUAUUAA | | |
| AD-1423253.1 | AUAAGAAGCUGGA | 2884 | 986-1006 | UGCUAAGAUCCAG | 2954 | 984-1006 |
| | UCUUAGCA | | | CUUCUUAUUA | | |
| AD-1423254.1 | UAAGAAGCUGGAU | 2885 | 987-1007 | UTGCTAAGAUCCAG | 2955 | 985-1007 |
| | CUUAGCAA | | | CUUCUUAUU | | |
| AD-1423255.1 | AAGAAGCUGGAUC | 2886 | 988-1008 | UTUGCUAAGAUCCA | 2956 | 986-1008 |
| | UUAGCAAA | | | GCUUCUUAU | | |
| AD-1423256.1 | AGAAGCUGGAUCU | 2887 | 989-1009 | UGUUGCTAAGATCC | 2957 | 987-1009 |
| | UAGCAACA | | | AGCUUCUUA | | |
| AD-1423257.1 | GAAGCUGGAUCUU | 2888 | 990-1010 | UCGUTGCUAAGAUC | 2958 | 988-1010 |
| | AGCAACGA | | | CAGCUUCUU | | |
| AD-1423258.1 | AAGCUGGAUCUUA | 2889 | 991-1011 | UACGTUGCUAAGA | 2959 | 989-1011 |
| | GCAACGUA | | | UCCAGCUUCU | | |
| AD-1423259.1 | AGCUGGAUCUUAG | 2890 | 992-1012 | UGACGUTGCUAAG | 2960 | 990-1012 |
| | CAACGUCA | | | AUCCAGCUUC | | |
| AD-1423260.1 | GCUGGAUCUUAGC | 2891 | 993-1013 | UGGACGTUGCUAA | 2961 | 991-1013 |
| | AACGUCCA | | | GAUCCAGCUU | | |
| AD-1423261.1 | CUGGAUCUUAGCA | 2892 | 994-1014 | UTGGACGUUGCTAA | 2962 | 992-1014 |
| | ACGUCCAA | | | GAUCCAGCU | | |
| AD-1423262.1 | UGGAUCUUAGCAA | 2893 | 995-1015 | UCUGGACGUUGCU | 2963 | 993-1015 |
| | CGUCCAGA | | | AAGAUCCAGC | | |
| AD-1423263.1 | GGAUCUUAGCAAC | 2894 | 996-1016 | UACUGGACGUUGC | 2964 | 994-1016 |
| | GUCCAGUA | | | UAAGAUCCAG | | |
| AD-1423264.1 | GAUCUUAGCAACG | 2895 | 997-1017 | UGACTGGACGUTGC | 2965 | 995-1017 |
| | UCCAGUCA | | | UAAGAUCCA | | |
| AD-1423265.1 | AUCUUAGCAACGU | 2896 | 998-1018 | UGGACUGGACGTU | 2966 | 996-1018 |
| | CCAGUCCA | | | GCUAAGAUCC | | |
| AD-1423266.1 | UCUUAGCAACGUC | 2897 | 999-1019 | UTGGACTGGACGUU | 2967 | 997-1019 |
| | CAGUCCAA | | | GCUAAGAUC | | |
| AD-1423267.1 | CUUAGCAACGUCC | 2898 | 1000-1020 | UTUGGACUGGACG | 2968 | 998-1020 |
| | AGUCCAAA | | | UUGCUAAGAU | | |
| AD-1423268.1 | UUAGCAACGUCCA | 2899 | 1001-1021 | UCUUGGACUGGAC | 2969 | 999-1021 |
| | GUCCAAGA | | | GUUGCUAAGA | | |
| AD-1423269.1 | UAGCAACGUCCAG | 2900 | 1002-1022 | UACUTGGACUGGAC | 2970 | 1000-1022 |
| | UCCAAGUA | | | GUUGCUAAG | | |
| AD-1423270.1 | AGCAACGUCCAGU | 2901 | 1003-1023 | UCACTUGGACUGGA | 2971 | 1001-1023 |
| | CCAAGUGA | | | CGUUGCUAA | | |
| AD-1423271.1 | GCAACGUCCAGUC | 2902 | 1004-1024 | UACACUTGGACTGG | 2972 | 1002-1024 |
| | CAAGUGUA | | | ACGUUGCUA | | |
| AD-1423272.1 | CAACGUCCAGUCC | 2903 | 1005-1025 | UCACACTUGGACUG | 2973 | 1003-1025 |
| | AAGUGUGA | | | GACGUUGCU | | |
| AD-1423273.1 | AACGUCCAGUCCA | 2904 | 1006-1026 | UCCACACUUGGACU | 2974 | 1004-1026 |
| | AGUGUGGA | | | GGACGUUGC | | |
| AD-1423274.1 | ACGUCCAGUCCAA | 2905 | 1007-1027 | UGCCACACUUGGAC | 2975 | 1005-1027 |
| | GUGUGGCA | | | UGGACGUUG | | |
| AD-1423275.1 | CGUCCAGUCCAAG | 2906 | 1008-1028 | UAGCCACACUUGG | 2976 | 1006-1028 |
| | UGUGGCUA | | | ACUGGACGUU | | |
| AD-1423276.1 | GUCCAGUCCAAGU | 2907 | 1009-1029 | UGAGCCACACUTGG | 2977 | 1007-1029 |
| | GUGGCUCA | | | ACUGGACGU | | |
| AD-1423277.1 | UCCAGUCCAAGUG | 2908 | 1010-1030 | UTGAGCCACACTUG | 2978 | 1008-1030 |
| | UGGCUCAA | | | GACUGGACG | | |
| AD-1423278.1 | CCAGUCCAAGUGU | 2909 | 1011-1031 | UTUGAGCCACACUU | 2979 | 1009-1031 |
| | GGCUCAAA | | | GGACUGGAC | | |
| AD-1423279.1 | CAGUCCAAGUGUG | 2910 | 1012-1032 | UTUUGAGCCACACU | 2980 | 1010-1032 |
| | GCUCAAAA | | | UGGACUGGA | | |
| AD-1423280.1 | AGUCCAAGUGUGG | 2911 | 1013-1033 | UCUUTGAGCCACAC | 2981 | 1011-1033 |
| | CUCAAAGA | | | UUGGACUGG | | |
| AD-1423281.1 | GUCCAAGUGUGGC | 2912 | 1014-1034 | UCCUTUGAGCCACA | 2982 | 1012-1034 |
| | UCAAAGGA | | | CUUGGACUG | | |
| AD-1423282.1 | UCCAAGUGUGGCU | 2913 | 1015-1035 | UTCCTUTGAGCCAC | 2983 | 1013-1035 |
| | CAAAGGAA | | | ACUUGGACU | | |
| AD-1423283.1 | CCAAGUGUGGCUC | 2914 | 1016-1036 | UAUCCUTUGAGCCA | 2984 | 1014-1036 |
| | AAAGGAUA | | | CACUUGGAC | | |
| AD-1423284.1 | CAAGUGUGGCUCA | 2915 | 1017-1037 | UTAUCCTUUGAGCC | 2985 | 1015-1037 |
| | AAGGAUAA | | | ACACUUGGA | | |
| AD-1423285.1 | AAGUGUGGCUCAA | 2916 | 1018-1038 | UTUATCCUUUGAGC | 2986 | 1016-1038 |
| | AGGAUAAA | | | CACACUUGG | | |
| AD-1423286.1 | AGUGUGGCUCAAA | 2917 | 1019-1039 | UAUUAUCCUUUGA | 2987 | 1017-1039 |
| | GGAUAAUA | | | GCCACACUUG | | |
| AD-1423287.1 | GUGUGGCUCAAAG | 2918 | 1020-1040 | UTAUTATCCUUTGA | 2988 | 1018-1040 |
| | GAUAAUAA | | | GCCACACUU | | |
| AD-1423288.1 | UGUGGCUCAAAGG | 2919 | 1021-1041 | UAUATUAUCCUTUG | 2989 | 1019-1041 |
| | AUAAUAUA | | | AGCCACACU | | |
| AD-1423289.1 | GUGGCUCAAAGGA | 2920 | 1022-1042 | UGAUAUTAUCCTUU | 2990 | 1020-1042 |
| | UAAUAUCA | | | GAGCCACAC | | |
| AD-1423290.1 | UGGCUCAAAGGAU | 2921 | 1023-1043 | UTGATATUAUCCUU | 2991 | 1021-1043 |
| | AAUAUCAA | | | UGAGCCACA | | |
| AD-1423291.1 | GGCUCAAAGGAUA | 2922 | 1024-1044 | UTUGAUAUUAUCC | 2992 | 1022-1044 |
| | AUAUCAAA | | | UUUGAGCCAC | | |
| AD-1423292.1 | GCUCAAAGGAUAA | 2923 | 1025-1045 | UTUUGATAUUATCC | 2993 | 1023-1045 |
| | UAUCAAAA | | | UUUGAGCCA | | |
| AD-1423293.1 | CUCAAAGGAUAAU | 2924 | 1026-1046 | UGUUTGAUAUUAU | 2994 | 1024-1046 |
| | AUCAAACA | | | CCUUUGAGCC | | |
| AD-1423294.1 | UCAAAGGAUAAUA | 2925 | 1027-1047 | UTGUTUGAUAUTAU | 2995 | 1025-1047 |
| | UCAAACAA | | | CCUUUGAGC | | |
| AD-1423295.1 | CAAAGGAUAAUAU | 2926 | 1028-1048 | UGUGTUTGAUATUA | 2996 | 1026-1048 |
| | CAAACACA | | | UCCUUUGAG | | |
| AD-1423296.1 | AAAGGAUAAUAUC | 2927 | 1029-1049 | UCGUGUTUGAUAU | 2997 | 1027-1049 |
| | AAACACGA | | | UAUCCUUUGA | | |
| AD-1423297.1 | AAGGAUAAUAUCA | 2928 | 1030-1050 | UACGTGTUUGATAU | 2998 | 1028-1050 |
| | AACACGUA | | | UAUCCUUUG | | |
| AD-1423298.1 | AGGAUAAUAUCAA | 2929 | 1031-1051 | UGACGUGUUUGAU | 2999 | 1029-1051 |
| | ACACGUCA | | | AUUAUCCUUU | | |
| AD-1423299.1 | GGAUAAUAUCAAA | 2930 | 1032-1052 | UGGACGTGUUUGA | 3000 | 1030-1052 |
| | CACGUCCA | | | UAUUAUCCUU | | |
| AD-1423300.1 | GAUAAUAUCAAAC | 2931 | 1033-1053 | UGGGACGUGUUTG | 3001 | 1031-1053 |
| | ACGUCCCA | | | AUAUUAUCCU | | |
| AD-1397266.2 | AUAAUAUCAAACA | 2932 | 1034-1054 | UCGGGACGUGUTU | 3002 | 1032-1054 |
| | CGUCCCGA | | | GAUAUUAUCC | | |
| AD-1423301.1 | UAAUAUCAAACAC | 2933 | 1035-1055 | UCCGGGACGUGTUU | 3003 | 1033-1055 |
| | GUCCCGGA | | | GAUAUUAUC | | |
| AD-1397268.2 | AAUAUCAAACACG | 2934 | 1036-1056 | UCCCGGGACGUGU | 3004 | 1034-1056 |
| | UCCCGGGA | | | UUGAUAUUAU | | |
| AD-1423302.1 | AUAUCAAACACGU | 2935 | 1037-1057 | UTCCCGGGACGTGU | 3005 | 1035-1057 |
| | CCCGGGAA | | | UUGAUAUUA | | |
| AD-1397270.2 | UAUCAAACACGUC | 2936 | 1038-1058 | UCUCCCGGGACGUG | 3006 | 1036-1058 |
| | CCGGGAGA | | | UUUGAUAUU | | |
| AD-1397271.2 | AUCAAACACGUCC | 2937 | 1039-1059 | UCCUCCCGGGACGU | 3007 | 1037-1059 |
| | CGGGAGGA | | | GUUUGAUAU | | |
| AD-1423303.1 | UCAAACACGUCCC | 2938 | 1040-1060 | UGCCTCCCGGGACG | 3008 | 1038-1060 |
| | GGGAGGCA | | | UGUUUGAUA | | |
| AD-1423304.1 | CAAACACGUCCCG | 2939 | 1041-1061 | UCGCCUCCCGGGAC | 3009 | 1039-1061 |
| | GGAGGCGA | | | GUGUUUGAU | | |
| AD-1423305.1 | AAACACGUCCCGG | 2940 | 1042-1062 | UCCGCCTCCCGGGA | 3010 | 1040-1062 |
| | GAGGCGGA | | | CGUGUUUGA | | |
| AD-1423306.1 | AACACGUCCCGGG | 2941 | 1043-1063 | UGCCGCCUCCCGGG | 3011 | 1041-1063 |
| | AGGCGGCA | | | ACGUGUUUG | | |
| AD-1397277.2 | CACGUCCCGGGAG | 2942 | 1045-1065 | UCUGCCGCCUCCCG | 3012 | 1043-1065 |
| | GCGGCAGA | | | GGACGUGUU | | |

TABLE 23
Modified Sense and Antisense Strand Sequences of MAPT dsRNA Agents- Screen 8

| | | SEQ | | SEQ | mRNA Target | SEQ |
|---|---|---|---|---|---|---|
| | Sense Sequence 5′ to | ID | Antisense Sequence 5′ | ID | Sequence | ID |
| Duplex ID | 3′ | NO: | to 3′ | NO: | 5′ to 3′ | NO: |
| AD-1423242.1 | gscsaga(Uhd)aaUfUfA | 3013 | VPusdGscudTc(Tgn)uau | 3083 | GUGCAGAUAAUUA | 3153 |
| | fauaagaagcaL96 | | udAaUfuaucugcsasc | | AUAAGAAGCU | |
| AD-1423243.1 | csasgau(Ahd)auUfAfA | 3014 | VPusdAsgcdTu(C2p)uua | 3084 | UGCAGAUAAUUAA | 3154 |
| | fuaagaagcuaL96 | | udTaAfuuaucugscsa | | UAAGAAGCUG | |
| AD-1423244.1 | asgsaua(Ahd)uuAfAfU | 3015 | VPusdCsagdCudTcuuad | 3085 | GCAGAUAAUUAAU | 3155 |
| | faagaagcugaL96 | | TuAfauuaucusgsc | | AAGAAGCUGG | |
| AD-1423245.1 | gsasuaa(Uhd)uaAfUfA | 3016 | VPusdCscadGc(Tgn)ucu | 3086 | CAGAUAAUUAAUA | 3156 |
| | fagaagcuggaL96 | | udAuUfaauuaucsusg | | AGAAGCUGGA | |
| AD-1423246.1 | asusaau(Uhd)aaUfAfA | 3017 | VPusdTsecdAg(C2p)uuc | 3087 | AGAUAAUUAAUAA | 3157 |
| | fgaagcuggaaL96 | | udTaUfuaauuauscsu | | GAAGCUGGAU | |
| AD-1423247.1 | usasauu(Ahd)auAfAfG | 3018 | VPusdAsucdCa(G2p)cuu | 3088 | GAUAAUUAAUAAG | 3158 |
| | faagcuggauaL96 | | cdTuAfuuaauuasusc | | AAGCUGGAUC | |
| AD-1423248.1 | asasuua(Ahd)uaAfGfA | 3019 | VPusdGsaudCc(Agn)gcu | 3089 | AUAAUUAAUAAGA | 3159 |
| | fagcuggaucaL96 | | udCuUfauuaauusasu | | AGCUGGAUCU | |
| AD-1423249.1 | asusuaa(Uhd)aaGfAfA | 3020 | VPusdAsgadTc(C2p)agc | 3090 | UAAUUAAUAAGAA | 3160 |
| | fgcuggaucuaL96 | | udTcUfuauuaaususa | | GCUGGAUCUU | |
| AD-1423250.1 | ususaau(Ahd)agAfAfG | 3021 | VPusdAsagdAudCcagcd | 3091 | AAUUAAUAAGAAG | 3161 |
| | fcuggaucuuaL96 | | TuCfuuauuaasusu | | CUGGAUCUUA | |
| AD-1423251.1 | usasaua(Ahd)gaAfGfC | 3022 | VPusdTsaadGa(Tgn)cca | 3092 | AUUAAUAAGAAGC | 3162 |
| | fuggaucuuaaL96 | | gdCuUfcuuauuasasu | | UGGAUCUUAG | |
| AD-1423252.1 | asasuaa(Ghd)aaGfCfUf | 3023 | VPusdCsuadAg(Agn)ucc | 3093 | UUAAUAAGAAGCU | 3163 |
| | ggaucuuagaL96 | | adGcUfucuuauusasa | | GGAUCUUAGC | |
| AD-1423253.1 | asusaag(Ahd)agCfUfG | 3024 | VPusdGscudAadGauccd | 3094 | UAAUAAGAAGCUG | 3164 |
| | fgaucuuagcaL96 | | AgCfuucuuaususa | | GAUCUUAGCA | |
| AD-1423254.1 | usasaga(Ahd)gcUfGfG | 3025 | VPusdTsgcdTa(Agn)gau | 3095 | AAUAAGAAGCUGG | 3165 |
| | faucuuagcaaL96 | | cdCaGfcuucuuasusu | | AUCUUAGCAA | |
| AD-1423255.1 | asasgaa(Ghd)cuGfGfA | 3026 | VPusdTsugdCu(Agn)aga | 3096 | AUAAGAAGCUGGA | 3166 |
| | fucuuagcaaaL96 | | udCcAfgcuucuusasu | | UCUUAGCAAC | |
| AD-1423256.1 | asgsaag(Chd)ugGfAfU | 3027 | VPusdGsuudGc(Tgn)aag | 3097 | UAAGAAGCUGGAU | 3167 |
| | fcuuagcaacaL96 | | adTcCfagcuucususa | | CUUAGCAACG | |
| AD-1423257.1 | gsasagc(Uhd)ggAfUfC | 3028 | VPusdCsgudTg(C2p)uaa | 3098 | AAGAAGCUGGAUC | 3168 |
| | fuuagcaacgaL96 | | gdAuCfcagcuucsusu | | UUAGCAACGU | |
| AD-1423258.1 | asasgcu(Ghd)gaUfCfU | 3029 | VPusdAscgdTu(G2p)cua | 3099 | AGAAGCUGGAUCU | 3169 |
| | fuagcaacguaL96 | | adGaUfccagcuuscsu | | UAGCAACGUC | |
| AD-1423259.1 | asgscug(Ghd)auCfUfU | 3030 | VPusdGsacdGudTgcuad | 3100 | GAAGCUGGAUCUU | 3170 |
| | fagcaacgucaL96 | | AgAfuccagcususc | | AGCAACGUCC | |
| AD-1423260.1 | gscsugg(Ahd)ucUfUfA | 3031 | VPusdGsgadCgdTugcud | 3101 | AAGCUGGAUCUUA | 3171 |
| | fgcaacguccaL96 | | AaGfauccagcsusu | | GCAACGUCCA | |
| AD-1423261.1 | csusgga(Uhd)cuUfAfG | 3032 | VPusdTsggdAc(G2p)uug | 3102 | AGCUGGAUCUUAG | 3172 |
| | fcaacguccaaL96 | | cdTaAfgauccagscsu | | CAACGUCCAG | |
| AD-1423262.1 | usgsgau(Chd)uuAfGfC | 3033 | VPusdCsugdGadCguugd | 3103 | GCUGGAUCUUAGC | 3173 |
| | faacguccagaL96 | | CuAfagauccasgsc | | AACGUCCAGU | |
| AD-1423263.1 | gsgsauc(Uhd)uaGfCfA | 3034 | VPusdAscudGg(Agn)cgu | 3104 | CUGGAUCUUAGCA | 3174 |
| | facguccaguaL96 | | udGcUfaagauccsasg | | ACGUCCAGUC | |
| AD-1423264.1 | gsasucu(Uhd)agCfAfA | 3035 | VPusdGsacdTg(G2p)acg | 3105 | UGGAUCUUAGCAA | 3175 |
| | fcguccagucaL96 | | udTgCfuaagaucscsa | | CGUCCAGUCC | |
| AD-1423265.1 | asuscuu(Ahd)gcAfAfC | 3036 | VPusdGsgadCu(G2p)gac | 3106 | GGAUCUUAGCAAC | 3176 |
| | fguccaguccaL96 | | gdTuGfcuaagauscsc | | GUCCAGUCCA | |
| AD-1423266.1 | uscsuua(Ghd)caAfCfG | 3037 | VPusdTsggdAc(Tgn)gga | 3107 | GAUCUUAGCAACG | 3177 |
| | fuccaguccaaL96 | | cdGuUfgcuaagasusc | | UCCAGUCCAA | |
| AD-1423267.1 | csusuag(Chd)aaCfGfUf | 3038 | VPusdTsugdGa(C2p)ugg | 3108 | AUCUUAGCAACGU | 3178 |
| | ccaguccaaaL96 | | adCgUfugcuaagsasu | | CCAGUCCAAG | |
| AD-1423268.1 | ususagc(Ahd)acGfUfC | 3039 | VPusdCsuudGg(Agn)cug | 3109 | UCUUAGCAACGUC | 3179 |
| | fcaguccaagaL96 | | gdAcGfuugcuaasgsa | | CAGUCCAAGU | |
| AD-1423269.1 | usasgca(Ahd)cgUfCfCf | 3040 | VPusdAscudTg(G2p)acu | 3110 | CUUAGCAACGUCC | 3180 |
| | aguccaaguaL96 | | gdGaCfguugcuasasg | | AGUCCAAGUG | |
| AD-1423270.1 | asgscaa(Chd)guCfCfAf | 3041 | VPusdCsacdTu(G2p)gac | 3111 | UUAGCAACGUCCA | 3181 |
| | guccaagugaL96 | | udGgAfcguugcusasa | | GUCCAAGUGU | |
| AD-1423271.1 | gscsaac(Ghd)ucCfAfGf | 3042 | VPusdAscadCudTggacd | 3112 | UAGCAACGUCCAG | 3182 |
| | uccaaguguaL96 | | TgGfacguugcsusa | | UCCAAGUGUG | |
| AD-1423272.1 | csasacg(Uhd)ccAfGfUf | 3043 | VPusdCsacdAcdTuggad | 3113 | AGCAACGUCCAGU | 3183 |
| | ccaagugugaL96 | | CuGfgacguugscsu | | CCAAGUGUGG | |
| AD-1423273.1 | asascgu(Chd)caGfUfCf | 3044 | VPusdCscadCadCuuggd | 3114 | GCAACGUCCAGUC | 3184 |
| | caaguguggaL96 | | AcUfggacguusgsc | | CAAGUGUGGC | |
| AD-1423274.1 | ascsguc(Chd)agUfCfCf | 3045 | VPusdGsccdAc(Agn)cuu | 3115 | CAACGUCCAGUCC | 3185 |
| | aaguguggcaL96 | | gdGaCfuggacgususg | | AAGUGUGGCU | |
| AD-1423275.1 | csgsucc(Ahd)guCfCfA | 3046 | VPusdAsgcdCa(C2p)acu | 3116 | AACGUCCAGUCCA | 3186 |
| | faguguggcuaL96 | | udGgAfcuggacgsusu | | AGUGUGGCUC | |
| AD-1423276.1 | gsuscca(Ghd)ucCfAfA | 3047 | VPusdGsagdCc(Agn)cac | 3117 | ACGUCCAGUCCAA | 3187 |
| | fguguggcucaL96 | | udTgGfacuggacsgsu | | GUGUGGCUCA | |
| AD-1423277.1 | uscscag(Uhd)ccAfAfG | 3048 | VPusdTsgadGc(C2p)aca | 3118 | CGUCCAGUCCAAG | 3188 |
| | fuguggcucaaL96 | | cdTuGfgacuggascsg | | UGUGGCUCAA | |
| AD-1423278.1 | cscsagu(Chd)caAfGfUf | 3049 | VPusdTsugdAg(C2p)cac | 3119 | GUCCAGUCCAAGU | 3189 |
| | guggcucaaaL96 | | adCuUfggacuggsasc | | GUGGCUCAAA | |
| AD-1423279.1 | csasguc(Chd)aaGfUfGf | 3050 | VPusdTsuudGa(G2p)cca | 3120 | UCCAGUCCAAGUG | 3190 |
| | uggcucaaaaL96 | | cdAcUfuggacugsgsa | | UGGCUCAAAG | |
| AD-1423280.1 | asgsucc(Ahd)agUfGfU | 3051 | VPusdCsuudTg(Agn)gcc | 3121 | CCAGUCCAAGUGU | 3191 |
| | fggcucaaagaL96 | | adCaCfuuggacusgsg | | GGCUCAAAGG | |
| AD-1423281.1 | gsuscca(Ahd)guGfUfG | 3052 | VPusdCscudTudGagccd | 3122 | CAGUCCAAGUGUG | 3192 |
| | fgcucaaaggaL96 | | AcAfcuuggacsusg | | GCUCAAAGGA | |
| AD-1423282.1 | uscscaa(Ghd)ugUfGfG | 3053 | VPusdTsccdTudTgagcd | 3123 | AGUCCAAGUGUGG | 3193 |
| | fcucaaaggaaL96 | | CaCfacuuggascsu | | CUCAAAGGAU | |
| AD-1423283.1 | cscsaag(Uhd)guGfGfC | 3054 | VPusdAsucdCudTugagd | 3124 | GUCCAAGUGUGGC | 3194 |
| | fucaaaggauaL96 | | CcAfcacuuggsasc | | UCAAAGGAUA | |
| AD-1423284.1 | csasagu(Ghd)ugGfCfU | 3055 | VPusdTsaudCc(Tgn)uug | 3125 | UCCAAGUGUGGCU | 3195 |
| | fcaaaggauaaL96 | | adGcCfacacuugsgsa | | CAAAGGAUAA | |
| AD-1423285.1 | asasgug(Uhd)ggCfUfC | 3056 | VPusdTsuadTc(C2p)uuu | 3126 | CCAAGUGUGGCUC | 3196 |
| | faaaggauaaaL96 | | gdAgCfcacacuusgsg | | AAAGGAUAAU | |
| AD-1423286.1 | asgsugu(Ghd)gcUfCfA | 3057 | VPusdAsuudAu(C2p)cuu | 3127 | CAAGUGUGGCUCA | 3197 |
| | faaggauaauaL96 | | udGaGfccacacususg | | AAGGAUAAUA | |
| AD-1423287.1 | gsusgug(Ghd)cuCfAfA | 3058 | VPusdTsaudTa(Tgn)ccu | 3128 | AAGUGUGGCUCAA | 3198 |
| | faggauaauaaL96 | | udTgAfgccacacsusu | | AGGAUAAUAU | |
| AD-1423288.1 | usgsugg(Chd)ucAfAfA | 3059 | VPusdAsuadTu(Agn)ucc | 3129 | AGUGUGGCUCAAA | 3199 |
| | fggauaauauaL96 | | udTuGfagccacascsu | | GGAUAAUAUC | |
| AD-1423289.1 | gsusggc(Uhd)caAfAfG | 3060 | VPusdGsaudAudTauccd | 3130 | GUGUGGCUCAAAG | 3200 |
| | fgauaauaucaL96 | | TuUfgagccacsasc | | GAUAAUAUCA | |
| AD-1423290.1 | usgsgcu(Chd)aaAfGfG | 3061 | VPusdTsgadTa(Tgn)uau | 3131 | UGUGGCUCAAAGG | 3201 |
| | fauaauaucaaL96 | | cdCuUfugagccascsa | | AUAAUAUCAA | |
| AD-1423291.1 | gsgscuc(Ahd)aaGfGfA | 3062 | VPusdTsugdAudAuuaud | 3132 | GUGGCUCAAAGGA | 3202 |
| | fuaauaucaaaL96 | | CcUfuugagccsasc | | UAAUAUCAAA | |
| AD-1423292.1 | gscsuca(Ahd)agGfAfU | 3063 | VPusdTsuudGa(Tgn)auu | 3133 | UGGCUCAAAGGAU | 3203 |
| | faauaucaaaaL96 | | adTcCfuuugagcscsa | | AAUAUCAAAC | |
| AD-1423293.1 | csuscaa(Ahd)ggAfUfA | 3064 | VPusdGsuudTg(Agn)uau | 3134 | GGCUCAAAGGAUA | 3204 |
| | fauaucaaacaL96 | | udAuCfcuuugagscsc | | AUAUCAAACA | |
| AD-1423294.1 | uscsaaa(Ghd)gaUfAfA | 3065 | VPusdTsgudTu(G2p)aua | 3135 | GCUCAAAGGAUAA | 3205 |
| | fuaucaaacaaL96 | | udTaUfccuuugasgsc | | UAUCAAACAC | |
| AD-1423295.1 | csasaag(Ghd)auAfAfU | 3066 | VPusdGsugdTu(Tgn)gau | 3136 | CUCAAAGGAUAAU | 3206 |
| | faucaaacacaL96 | | adTuAfuccuuugsasg | | AUCAAACACG | |
| AD-1423296.1 | asasagg(Ahd)uaAfUfA | 3067 | VPusdCsgudGu(Tgn)uga | 3137 | UCAAAGGAUAAUA | 3207 |
| | fucaaacacgaL96 | | udAuUfauccuuusgsa | | UCAAACACGU | |
| AD-1423297.1 | asasgga(Uhd)aaUfAfU | 3068 | VPusdAscgdTg(Tgn)uug | 3138 | CAAAGGAUAAUAU | 3208 |
| | fcaaacacguaL96 | | adTaUfuauccuususg | | CAAACACGUC | |
| AD-1423298.1 | asgsgau(Ahd)auAfUfC | 3069 | VPusdGsacdGu(G2p)uuu | 3139 | AAAGGAUAAUAUC | 3209 |
| | faaacacgucaL96 | | gdAuAfuuauccususu | | AAACACGUCC | |
| AD-1423299.1 | gsgsaua(Ahd)uaUfCfA | 3070 | VPusdGsgadCgdTguuud | 3140 | AAGGAUAAUAUCA | 3210 |
| | faacacguccaL96 | | GaUfauuauccsusu | | AACACGUCCC | |
| AD-1423300.1 | gsasuaa(Uhd)auCfAfA | 3071 | VPusdGsggdAc(G2p)ug | 3141 | AGGAUAAUAUCAA | 3211 |
| | facacgucccaL96 | | uudTgAfuauuaucscsu | | ACACGUCCCG | |
| AD-1397266.2 | asusaau(Ahd)ucAfAfA | 3072 | VPusdCsggdGadCgugud | 3142 | GGAUAAUAUCAAA | 3212 |
| | fcacgucccgaL96 | | TuGfauauuauscsc | | CACGUCCCGG | |
| AD-1423301.1 | usasaua(Uhd)caAfAfCf | 3073 | VPusdCscgdGg(Agn)cgu | 3143 | GAUAAUAUCAAAC | 3213 |
| | acgucccggaL96 | | gdTuUfgauauuasusc | | ACGUCCCGGG | |
| AD-1397268.2 | asasuau(Chd)aaAfCfAf | 3074 | VPusdCsccdGgdGacgud | 3144 | AUAAUAUCAAACA | 3214 |
| | cgucccgggaL96 | | GuUfugauauusasu | | CGUCCCGGGA | |
| AD-1423302.1 | asusauc(Ahd)aaCfAfCf | 3075 | VPusdTsccdCg(G2p)gac | 3145 | UAAUAUCAAACAC | 3215 |
| | gucccgggaaL96 | | gdTgUfuugauaususa | | GUCCCGGGAG | |
| AD-1397270.2 | usasuca(Ahd)acAfCfGf | 3076 | VPusdCsucdCcdGggacd | 3146 | AAUAUCAAACACG | 3216 |
| | ucccgggagaL96 | | GuGfuuugauasusu | | UCCCGGGAGG | |
| AD-1397271.2 | asuscaa(Ahd)caCfGfUf | 3077 | VPusdCscudCcdCgggad | 3147 | AUAUCAAACACGU | 3217 |
| | cccgggaggaL96 | | CgUfguuugausasu | | CCCGGGAGGC | |
| AD-1423303.1 | uscsaaa(Chd)acGfUfCf | 3078 | VPusdGsccdTc(C2p)cgg | 3148 | UAUCAAACACGUC | 3218 |
| | ccgggaggcaL96 | | gdAcGfuguuugasusa | | CCGGGAGGCG | |
| AD-1423304.1 | csasaac(Ahd)cgUfCfCf | 3079 | VPusdCsgcdCu(C2p)ccg | 3149 | AUCAAACACGUCC | 3219 |
| | cgggaggcgaL96 | | gdGaCfguguuugsasu | | CGGGAGGCGG | |
| AD-1423305.1 | asasaca(Chd)guCfCfCf | 3080 | VPusdCscgdCc(Tgn)ccc | 3150 | UCAAACACGUCCC | 3220 |
| | gggaggcggaL96 | | gdGgAfcguguuusgsa | | GGGAGGCGGC | |
| AD-1423306.1 | asascac(Ghd)ucCfCfGf | 3081 | VPusdGsccdGc(C2p)ucc | 3151 | CAAACACGUCCCG | 3221 |
| | ggaggcggcaL96 | | cdGgGfacguguususg | | GGAGGCGGCA | |
| AD-1397277.2 | csascgu(Chd)ccGfGfGf | 3082 | VPusdCsugdCcdGccucd | 3152 | AACACGUCCCGGG | 3222 |
| | aggcggcagaL96 | | CcGfggacgugsusu | | AGGCGGCAGU | |

TABLE 24
MAPT Single Dose Screens in BE(2)C Cells-Screens 5-8

| | 10 nM Dose | | 1 nM Dose | | 0.1 nM Dose | |
|---|---|---|---|---|---|---|
| | Avg % | | Avg % | | Avg % | |
| | MAPT | | MAPT | | MAPT | |
| | mRNA | | mRNA | | mRNA | |
| Duplex | Remaining | SD | Remaining | SD | Remaining | SD |
| AD-1397070.1 | 29 | 4 | 37 | 18 | 76 | 4 |
| AD-1397070.2 | 35 | 2 | 48 | 6 | 45 | 7 |
| AD-1397071.1 | 28 | 6 | 44 | 9 | 84 | 10 |
| AD-1397071.2 | 41 | 6 | 54 | 12 | 50 | 5 |
| AD-1397072.1 | 12 | 3 | 16 | 2 | 44 | 3 |
| AD-1397072.2 | 19 | 3 | 24 | 7 | 25 | 8 |
| AD-1397073.1 | 20 | 10 | 26 | 4 | 79 | 4 |
| AD-1397073.2 | 25 | 2 | 30 | 5 | 30 | 5 |
| AD-1397074.1 | 52 | 14 | 55 | 12 | 93 | 16 |
| AD-1397074.2 | 53 | 4 | 73 | 17 | 67 | 17 |
| AD-1397075.1 | 47 | 10 | 59 | 25 | 80 | 4 |
| AD-1397075.2 | 56 | 5 | 63 | 9 | 48 | 4 |
| AD-1397076.1 | 16 | 6 | 29 | 10 | 65 | 5 |
| AD-1397076.2 | 21 | 4 | 29 | 3 | 39 | 5 |
| AD-1397077.1 | 17 | 6 | 24 | 5 | 79 | 13 |
| AD-1397077.2 | 20 | 2 | 33 | 5 | 44 | 7 |
| AD-1397078.1 | 22 | 5 | 28 | 7 | 75 | 13 |
| AD-1397078.2 | 34 | 8 | 36 | 8 | 52 | 16 |
| AD-1397250.1 | 75 | 10 | 69 | 11 | 76 | 18 |
| AD-1397251.1 | 15 | 3 | 37 | 21 | 24 | 8 |
| AD-1397252.1 | 24 | 6 | 24 | 7 | 35 | 12 |
| AD-1397253.1 | 31 | 5 | 56 | 5 | 69 | 23 |
| AD-1397254.1 | 40 | 8 | 41 | 2 | 49 | 9 |
| AD-1397255.1 | 36 | 17 | 40 | 17 | 49 | 10 |
| AD-1397256.1 | 53 | 7 | 65 | 11 | 75 | 15 |
| AD-1397257.1 | 19 | 5 | 25 | 11 | 30 | 18 |
| AD-1397258.1 | 17 | 2 | 24 | 6 | 32 | 11 |
| AD-1397259.1 | 22 | 6 | 26 | 3 | 32 | 9 |
| AD-1397260.1 | 41 | 11 | 54 | 10 | 75 | 11 |
| AD-1397261.1 | 35 | 12 | 34 | 13 | 65 | 19 |
| AD-1397262.1 | 34 | 16 | 44 | 19 | 45 | 10 |
| AD-1397263.1 | 23 | 4 | 29 | 4 | 86 | 23 |
| AD-1397264.1 | 27 | 7 | 26 | 3 | 58 | 15 |
| AD-1397265.1 | 52 | 13 | 56 | 13 | 85 | 11 |
| AD-1423242.1 | 130 | 30 | 96 | 27 | 84 | 15 |
| AD-1423243.1 | 76 | 17 | 89 | 20 | 90 | 20 |
| AD-1423244.1 | 85 | 8 | 90 | 26 | 90 | 10 |
| AD-1423245.1 | 86 | 23 | 79 | 15 | 86 | 9 |
| AD-1423246.1 | 83 | 8 | 85 | 27 | 83 | 10 |
| AD-1423247.1 | 81 | 16 | 97 | 25 | 94 | 9 |
| AD-1423248.1 | 90 | 21 | 84 | 24 | 91 | 16 |
| AD-1423249.1 | 83 | 13 | 97 | 25 | 92 | 21 |
| AD-1423250.1 | 88 | 19 | 85 | 24 | 92 | 11 |
| AD-1423251.1 | 78 | 9 | 93 | 24 | 92 | 19 |
| AD-1423252.1 | 81 | 14 | 94 | 22 | 94 | 20 |
| AD-1423253.1 | 75 | 13 | 88 | 15 | 105 | 16 |
| AD-1423254.1 | 90 | 10 | 104 | 27 | 97 | 20 |
| AD-1423255.1 | 75 | 7 | 96 | 30 | 89 | 16 |
| AD-1423256.1 | 130 | 34 | 126 | 33 | 149 | 34 |
| AD-1423257.1 | 105 | 21 | 104 | 28 | 90 | 12 |
| AD-1423258.1 | 89 | 19 | 105 | 33 | 89 | 20 |
| AD-1423259.1 | 69 | 14 | 78 | 13 | 84 | 18 |
| AD-1423260.1 | 78 | 10 | 93 | 27 | 86 | 17 |
| AD-1423261.1 | 110 | 23 | 112 | 22 | 116 | 28 |
| AD-1423262.1 | 115 | 39 | 117 | 37 | 94 | 22 |
| AD-1423263.1 | 84 | 20 | 93 | 23 | 97 | 18 |
| AD-1423264.1 | 97 | 25 | 95 | 20 | 98 | 23 |
| AD-1423265.1 | 85 | 25 | 100 | 31 | 94 | 18 |
| AD-1423266.1 | 95 | 15 | 107 | 29 | 95 | 21 |
| AD-1423267.1 | 101 | 17 | 106 | 23 | 104 | 22 |
| AD-1423268.1 | 102 | 29 | 115 | 30 | 110 | 23 |
| AD-1423269.1 | 87 | 15 | 110 | 25 | 97 | 27 |
| AD-1423270.1 | 117 | 36 | 133 | 31 | 118 | 36 |
| AD-1423271.1 | 127 | 30 | 143 | 41 | 103 | 26 |
| AD-1423272.1 | 98 | 26 | 89 | 23 | 109 | 28 |
| AD-1423273.1 | 74 | 15 | 89 | 20 | 91 | 15 |
| AD-1423274.1 | 89 | 12 | 92 | 20 | 98 | 17 |
| AD-1423275.1 | 79 | 10 | 88 | 17 | 97 | 21 |
| AD-1423276.1 | 92 | 20 | 102 | 13 | 120 | 27 |
| AD-1423277.1 | 85 | 11 | 120 | 24 | 129 | 35 |
| AD-1423278.1 | 38 | 7 | 79 | 10 | 114 | 21 |
| AD-1423279.1 | 41 | 8 | 78 | 11 | 115 | 15 |
| AD-1423280.1 | 89 | 21 | 96 | 28 | 99 | 23 |
| AD-1423281.1 | 79 | 15 | 96 | 19 | 94 | 15 |
| AD-1423282.1 | 79 | 13 | 86 | 12 | 103 | 18 |
| AD-1423283.1 | 47 | 6 | 76 | 15 | 97 | 17 |
| AD-1423284.1 | 62 | 8 | 91 | 17 | 113 | 18 |
| AD-1423285.1 | 98 | 20 | 110 | 23 | 125 | 25 |
| AD-1423286.1 | 121 | 28 | 133 | 27 | 152 | 16 |
| AD-1423287.1 | 105 | 21 | 97 | 24 | 125 | 28 |
| AD-1423288.1 | 86 | 17 | 89 | 14 | 92 | 11 |
| AD-1423289.1 | 47 | 6 | 69 | 13 | 95 | 18 |
| AD-1423290.1 | 91 | 18 | 89 | 25 | 99 | 23 |
| AD-1423291.1 | 86 | 16 | 88 | 15 | 101 | 27 |
| AD-1423292.1 | 110 | 22 | 109 | 18 | 130 | 29 |
| AD-1423293.1 | 123 | 23 | 105 | 24 | 139 | 30 |
| AD-1423294.1 | 159 | 19 | 132 | 22 | 130 | 33 |
| AD-1423295.1 | 97 | 27 | 89 | 21 | 91 | 20 |
| AD-1423296.1 | 75 | 13 | 89 | 22 | 83 | 7 |
| AD-1423297.1 | 72 | 10 | 86 | 15 | 89 | 14 |
| AD-1423298.1 | 69 | 10 | 91 | 20 | 84 | 6 |
| AD-1423299.1 | 96 | 28 | 84 | 21 | 108 | 27 |
| AD-1423300.1 | 93 | 24 | 93 | 19 | 105 | 24 |
| AD-1397266.1 | 70 | | 82 | 22 | 91 | 32 |
| AD-1397266.2 | 94 | 10 | 104 | 16 | 113 | 21 |
| AD-1397267.1 | 89 | 27 | 107 | 41 | 113 | 33 |
| AD-1423301.1 | 131 | 18 | 112 | 27 | 135 | 33 |
| AD-1397268.1 | 133 | 45 | 98 | 34 | 116 | 39 |
| AD-1397268.2 | 87 | 17 | 95 | 20 | 108 | 20 |
| AD-1397269.1 | 104 | 49 | 115 | 42 | 128 | 34 |
| AD-1423302.1 | 85 | 13 | 98 | 19 | 102 | 13 |
| AD-1397270.1 | 86 | 12 | 103 | 35 | 112 | 25 |
| AD-1397270.2 | 99 | 19 | 94 | 19 | 92 | 19 |
| AD-1397271.1 | 110 | 30 | 89 | 31 | 124 | 42 |
| AD-1397271.2 | 84 | 16 | 106 | 25 | 108 | 18 |
| AD-1397272.1 | 91 | 7 | 86 | 24 | 95 | 28 |
| AD-1423303.1 | 93 | 18 | 111 | 24 | 102 | 16 |
| AD-1397273.1 | 102 | 15 | 101 | 24 | 87 | 12 |
| AD-1423304.1 | 108 | 24 | 124 | 32 | 123 | 23 |
| AD-1397274.1 | 86 | 7 | 90 | 14 | 119 | 19 |
| AD-1423305.1 | 114 | 19 | 135 | 14 | 136 | 16 |
| AD-1397275.1 | 109 | 36 | 107 | 29 | 124 | 8 |
| AD-1423306.1 | 72 | 10 | 95 | 26 | 82 | 13 |
| AD-1397276.1 | 128 | 42 | 135 | 27 | 142 | 22 |
| AD-1397277.1 | 137 | 29 | 117 | 30 | 131 | 17 |
| AD-1397277.2 | 76 | 16 | 81 | 13 | 80 | 8 |
| AD-1397278.1 | 166 | 21 | 156 | 33 | 167 | 24 |
| AD-1397279.1 | 99 | 36 | 92 | 27 | 105 | 27 |
| AD-1397280.1 | 99 | 21 | 80 | 13 | 87 | 6 |
| AD-1397281.1 | 100 | 14 | 89 | 29 | 88 | 29 |
| AD-1397282.1 | 104 | 25 | 99 | 17 | 80 | 19 |
| AD-1397283.1 | 118 | 18 | 115 | 35 | 122 | 7 |
| AD-1397284.1 | 120 | 24 | 118 | 37 | 133 | 20 |
| AD-1397285.1 | 175 | 25 | 161 | 32 | 151 | 37 |
| AD-1397286.1 | 130 | 43 | 130 | 27 | 128 | 14 |
| AD-1397287.1 | 79 | 11 | 72 | 20 | 91 | 19 |
| AD-1397079.1 | 25 | 5 | 37 | 12 | 85 | 22 |
| AD-1397079.2 | 34 | 6 | 46 | 17 | 58 | 12 |
| AD-1397288.1 | 48 | 10 | 60 | 16 | 66 | 9 |
| AD-1397289.1 | 57 | 16 | 46 | 10 | 52 | 12 |
| AD-1397290.1 | 44 | 11 | 57 | 15 | 76 | 13 |
| AD-1397080.1 | 12 | 5 | 14 | 3 | 77 | 12 |
| AD-1397080.2 | 23 | 9 | 34 | 8 | 35 | 9 |
| AD-1397291.1 | 33 | 5 | 46 | 14 | 61 | 11 |
| AD-1397292.1 | 65 | 7 | 74 | 17 | 66 | 14 |
| AD-1397293.1 | 17 | 3 | 20 | 4 | 22 | 3 |
| AD-1397294.1 | 21 | 7 | 31 | 10 | 32 | 6 |
| AD-1397081.1 | 14 | 4 | 19 | 7 | 67 | 15 |
| AD-1397081.2 | 22 | 4 | 26 | 5 | 25 | 5 |
| AD-1397295.1 | 18 | 4 | 34 | 10 | 40 | 10 |
| AD-1397082.1 | 25 | 9 | 38 | 8 | 86 | 4 |
| AD-1397082.2 | 49 | 13 | 50 | 12 | 62 | 20 |
| AD-1397083.1 | 15 | 4 | 26 | 16 | 80 | 2 |
| AD-1397083.2 | 31 | 6 | 50 | 7 | 63 | 20 |
| AD-1397296.1 | 52 | 11 | 68 | 22 | 87 | 9 |
| AD-1397297.1 | 28 | 8 | 42 | 9 | 60 | 13 |
| AD-1397298.1 | 19 | 5 | 25 | 3 | 20 | 3 |
| AD-1397299.1 | 18 | 5 | 27 | 5 | 34 | 9 |
| AD-1397300.1 | 73 | 28 | 89 | 15 | 87 | 14 |
| AD-1397301.1 | 51 | 12 | 49 | 15 | 61 | 19 |
| AD-1397302.1 | 42 | 7 | 47 | 6 | 57 | 17 |
| AD-1397084.1 | 18 | 6 | 26 | 4 | 100 | 20 |
| AD-1397085.1 | 16 | 5 | 27 | 10 | 79 | 6 |
| AD-1397086.1 | 65 | 12 | 62 | 16 | 85 | 5 |
| AD-1397303.1 | 45 | 8 | 72 | 11 | 89 | 24 |
| AD-1397087.1 | 18 | 5 | 31 | 7 | 90 | 11 |
| AD-1397087.2 | 23 | 6 | 36 | 3 | 49 | 16 |
| AD-1397304.1 | 33 | 3 | 36 | 6 | 38 | 2 |
| AD-1397305.1 | 75 | 21 | 69 | 5 | 61 | 5 |
| AD-1397306.1 | 28 | 6 | 41 | 3 | 44 | 10 |
| AD-1397307.1 | 32 | 8 | 33 | 3 | 50 | 15 |
| AD-1397308.1 | 33 | 7 | 44 | 10 | 51 | 14 |
| AD-1397309.1 | 84 | 16 | 83 | 29 | 92 | 30 |
| AD-1397310.1 | 37 | 11 | 39 | 11 | 54 | 18 |
| AD-1397311.1 | 63 | 18 | 64 | 10 | 60 | 11 |
| AD-1397312.1 | 59 | 4 | 56 | 10 | 58 | 16 |
| AD-1397313.1 | 72 | 11 | 55 | 5 | 60 | 16 |
| AD-1397314.1 | 75 | 7 | 68 | 9 | 58 | 10 |
| AD-1397315.1 | 30 | 11 | 40 | 8 | 52 | 22 |
| AD-1397316.1 | 70 | 13 | 74 | 22 | 86 | 19 |
| AD-1397317.1 | ill | 4 | 130 | 12 | 99 | 32 |
| AD-1397318.1 | 39 | 6 | 65 | 21 | 60 | 9 |
| AD-1397319.1 | 43 | 29 | 37 | 7 | 42 | 6 |
| AD-1397320.1 | 68 | 12 | 77 | 21 | 59 | 13 |
| AD-1397321.1 | 81 | 17 | 74 | 18 | 63 | 14 |
| AD-1397322.1 | 53 | 10 | 57 | 8 | 67 | 13 |
| AD-1397088.1 | 11 | 3 | 13 | 2 | 62 | 2 |
| AD-1397089.1 | 19 | 5 | 27 | 7 | 110 | 29 |
| AD-1397090.1 | 54 | 15 | 42 | 13 | 73 | 15 |
| AD-1397091.1 | 42 | 9 | 43 | 8 | 89 | 29 |
| AD-1397092.1 | 41 | 12 | 44 | 11 | 105 | 2 |
| AD-1397093.1 | 37 | 8 | 49 | 19 | 102 | 25 |
| AD-1397094.1 | 43 | 9 | 40 | 14 | 74 | 6 |
| AD-1397095.1 | 54 | 13 | 46 | 15 | 83 | 5 |
| AD-1397096.1 | 54 | 13 | 63 | 27 | 84 | 13 |
| AD-1397097.1 | 59 | 17 | 58 | 23 | 117 | 28 |
| AD-1397098.1 | 52 | 15 | 44 | 16 | 96 | 23 |
| AD-1397099.1 | 51 | 14 | 48 | 16 | 107 | 31 |
| AD-1397101.1 | 50 | 12 | 39 | 7 | 73 | 11 |
| AD-1397102.1 | 52 | 13 | 47 | 16 | 78 | 5 |
| AD-1397103.1 | 56 | 16 | 54 | 22 | 92 | 16 |
| AD-1397104.1 | 68 | 22 | 69 | 31 | 92 | 10 |
| AD-1397105.1 | 72 | 20 | 68 | 33 | ill | 18 |
| AD-1397106.1 | 82 | 25 | 84 | 37 | 97 | 12 |
| AD-1397107.1 | 75 | 28 | 78 | 38 | 86 | 4 |
| AD-1397108.1 | 52 | 19 | 59 | 38 | 95 | 24 |
| AD-1397109.1 | 48 | 2 | 45 | 24 | 81 | 11 |
| AD-1397110.1 | 51 | 3 | 40 | 18 | 79 | 3 |
| AD-1397111.1 | 63 | 6 | 63 | 35 | 98 | 8 |
| AD-1397112.1 | 57 | 13 | 57 | 29 | 114 | 23 |
| AD-1397113.1 | 57 | 5 | 59 | 36 | 113 | 19 |
| AD-1397114.1 | 58 | 15 | 81 | 51 | 134 | 14 |
| AD-1397115.1 | 80 | 15 | 85 | 33 | 121 | 17 |
| AD-1397116.1 | 65 | 16 | 63 | 26 | 82 | 11 |
| AD-1397117.1 | 57 | 17 | 54 | 16 | 100 | 14 |
| AD-1397118.1 | 64 | 15 | 68 | 24 | 98 | 21 |
| AD-1397119.1 | 71 | 25 | 85 | 35 | 103 | 24 |
| AD-1397120.1 | 73 | 20 | 75 | 32 | 118 | 28 |
| AD-1397121.1 | 82 | 25 | 99 | 39 | 119 | 19 |
| AD-1397122.1 | 81 | 24 | 89 | 28 | 156 | 17 |
| AD-1397123.1 | 83 | 22 | 57 | 10 | 104 | 24 |
| AD-1397124.1 | 73 | 20 | 59 | 16 | 89 | 5 |
| AD-1397125.1 | 46 | 6 | 49 | 15 | 94 | 13 |
| AD-1397126.1 | 55 | 13 | 46 | 12 | 81 | 2 |
| AD-1397127.1 | 63 | 16 | 49 | 9 | 95 | 14 |
| AD-1397128.1 | 78 | 22 | 56 | 25 | 87 | 13 |
| AD-1397129.1 | 79 | 20 | 73 | 28 | 118 | 24 |
| AD-1397130.1 | 86 | 29 | 81 | 42 | 116 | 24 |
| AD-1397131.1 | 62 | 17 | 49 | 15 | 86 | 12 |
| AD-1397132.1 | 46 | 10 | 42 | 18 | 73 | 8 |
| AD-1397133.1 | 66 | 19 | 41 | 11 | 64 | 5 |
| AD-1397134.1 | 47 | 12 | 51 | 16 | 83 | 12 |
| AD-1397135.1 | 53 | 15 | 42 | 10 | 92 | 20 |
| AD-1397136.1 | 54 | 16 | 52 | 13 | 106 | 30 |
| AD-1397137.1 | 65 | 17 | 65 | 24 | 84 | 11 |
| AD-1397138.1 | 39 | 10 | 33 | 7 | 62 | 15 |
| AD-1397139.1 | 39 | 7 | 33 | 9 | 56 | 4 |
| AD-1397140.1 | 44 | 13 | 57 | 23 | 79 | 31 |
| AD-1397141.1 | 43 | 8 | 101 | 29 | 119 | |
| AD-1397142.1 | 49 | 15 | 39 | 13 | 59 | 6 |
| AD-1397143.1 | 45 | 14 | 38 | 14 | 52 | 3 |
| AD-1397144.1 | 49 | 16 | 60 | 23 | 61 | 1 |
| AD-1397145.1 | 50 | 14 | 36 | 11 | 52 | 2 |
| AD-1397146.1 | 45 | 12 | 34 | 6 | 57 | 7 |
| AD-1397147.1 | 42 | 13 | 38 | 14 | 61 | 1 |
| AD-1397148.1 | 38 | 8 | 31 | 8 | 47 | 5 |
| AD-1397149.1 | 42 | 13 | 37 | 14 | 54 | 3 |
| AD-1397150.1 | 46 | 12 | 43 | 16 | 52 | 6 |
| AD-1397151.1 | 52 | 16 | 57 | 29 | 80 | 13 |
| AD-1397152.1 | 63 | 19 | 57 | 28 | 53 | 6 |
| AD-1397153.1 | 43 | 12 | 37 | 13 | 79 | 9 |
| AD-1397154.1 | 41 | 13 | 35 | 13 | 51 | 7 |
| AD-1397155.1 | 39 | 10 | 30 | 5 | 50 | 4 |
| AD-1397156.1 | 43 | 8 | 37 | 9 | 66 | 10 |
| AD-1397157.1 | 50 | 17 | 35 | 6 | 64 | 4 |
| AD-1397158.1 | 51 | 14 | 41 | 16 | 57 | 8 |
| AD-1397159.1 | 50 | 12 | 41 | 17 | 62 | 11 |
| AD-1397160.1 | 55 | 12 | 54 | 10 | 61 | 7 |
| AD-1397161.1 | 63 | 17 | 53 | 7 | 66 | 13 |
| AD-1397162.1 | 52 | 11 | 53 | 11 | 56 | 4 |
| AD-1397163.1 | 57 | 20 | 58 | 16 | 51 | 4 |
| AD-1397164.1 | 60 | 21 | 45 | 4 | 57 | 5 |
| AD-1397165.1 | 57 | 13 | 52 | 8 | 54 | 6 |
| AD-1397166.1 | 44 | 6 | 46 | 6 | 52 | 7 |
| AD-1397167.1 | 55 | 7 | 54 | 8 | 62 | 11 |
| AD-1397168.1 | 57 | 17 | 55 | 10 | 65 | 15 |
| AD-1397169.1 | 54 | 11 | 53 | 9 | 65 | 9 |
| AD-1397170.1 | 63 | 13 | 58 | 13 | 77 | 17 |
| AD-1397171.1 | 63 | 17 | 59 | 14 | 64 | 15 |
| AD-1397172.1 | 61 | 20 | 53 | 10 | 57 | 7 |
| AD-1397173.1 | 59 | 23 | 50 | 5 | 54 | 6 |
| AD-1397174.1 | 51 | 8 | 57 | 18 | 82 | 13 |
| AD-1397175.1 | 54 | 10 | 55 | 9 | 66 | 7 |
| AD-1397176.1 | 52 | 7 | 54 | 11 | 71 | 19 |
| AD-1397177.1 | 81 | 14 | 80 | 13 | 86 | 13 |
| AD-1397178.1 | 76 | 10 | 76 | 8 | 85 | 6 |
| AD-1397179.1 | 63 | 11 | 81 | 12 | 107 | 29 |
| AD-1397180.1 | 68 | 16 | 93 | 30 | 134 | 37 |
| AD-1397181.1 | 71 | 11 | 63 | 9 | 79 | 12 |
| AD-1397182.1 | 64 | 16 | 65 | 12 | 91 | 18 |
| AD-1397183.1 | 59 | 13 | 61 | 14 | 76 | 19 |
| AD-1397184.1 | 53 | 10 | 56 | 8 | 76 | 11 |
| AD-1397185.1 | 43 | 11 | 51 | 7 | 76 | 14 |
| AD-1397186.1 | 77 | 23 | 63 | 12 | 82 | 19 |
| AD-1397187.1 | 67 | 9 | 63 | 10 | 86 | 20 |
| AD-1397188.1 | 70 | 21 | 72 | 25 | 80 | 20 |
| AD-1397189.1 | 64 | 17 | 70 | 21 | 93 | 25 |
| AD-1397190.1 | 47 | 17 | 55 | 11 | 69 | 11 |
| AD-1397191.1 | 58 | 10 | 58 | 10 | 75 | 11 |
| AD-1397192.1 | 65 | 13 | 72 | 10 | 89 | 10 |
| AD-1397193.1 | 69 | 19 | 71 | 10 | 87 | 15 |
| AD-1397194.1 | 93 | 22 | 91 | 16 | 102 | 11 |
| AD-1397195.1 | 84 | 26 | 71 | 16 | 117 | 26 |
| AD-1397196.1 | 80 | 22 | 77 | 16 | 100 | 18 |
| AD-1397197.1 | 91 | 13 | 101 | 21 | 146 | 35 |
| AD-1397198.1 | 59 | 12 | 70 | 17 | 101 | 25 |
| AD-1397199.1 | 56 | 8 | 57 | 8 | 79 | 13 |
| AD-1397200.1 | 64 | 8 | 58 | 6 | 68 | 9 |
| AD-1397201.1 | 57 | 8 | 51 | 8 | 64 | 11 |
| AD-1397202.1 | 72 | 17 | 63 | 14 | 82 | 22 |
| AD-1397203.1 | 69 | 22 | 62 | 11 | 86 | 19 |
| AD-1397204.1 | 84 | 24 | 74 | 23 | 129 | 23 |
| AD-1397205.1 | 82 | 16 | 82 | 16 | 123 | 17 |
| AD-1397206.1 | 57 | 15 | 55 | 10 | 62 | 12 |
| AD-1397207.1 | 56 | 9 | 64 | 10 | 88 | 13 |
| AD-1397208.1 | 58 | 10 | 53 | 6 | 70 | 6 |
| AD-1397209.1 | 58 | 11 | 60 | 10 | 75 | 12 |
| AD-1397210.1 | 64 | 12 | 66 | 17 | 85 | 11 |
| AD-1397211.1 | 71 | 17 | 73 | 17 | 90 | 24 |
| AD-1397212.1 | 71 | 15 | 72 | 16 | 97 | 10 |
| AD-1397213.1 | 56 | 19 | 52 | 10 | 73 | 20 |
| AD-1397214.1 | 49 | 9 | 49 | 4 | 67 | 11 |
| AD-1397215.1 | 51 | 8 | 56 | 13 | 68 | 11 |
| AD-1397216.1 | 66 | 6 | 75 | 11 | 92 | 12 |
| AD-1397217.1 | 71 | 9 | 81 | 17 | 98 | 15 |
| AD-1397218.1 | 80 | 24 | 87 | 17 | 104 | 17 |
| AD-1397219.1 | 61 | 19 | 71 | 13 | 98 | 18 |
| AD-1397220.1 | 76 | 19 | 76 | 17 | 107 | 18 |
| AD-1397221.1 | 54 | 12 | 62 | 15 | 79 | 16 |
| AD-1397222.1 | 52 | 11 | 55 | 12 | 75 | 12 |
| AD-1397223.1 | 58 | 12 | 63 | 16 | 84 | 19 |
| AD-1397224.1 | 60 | 11 | 58 | 10 | 68 | 10 |
| AD-1397225.1 | 61 | 15 | 55 | 11 | 68 | 11 |
| AD-1397226.1 | 61 | 17 | 64 | 14 | 72 | 19 |
| AD-1397227.1 | 66 | 15 | 72 | 16 | 84 | 22 |
| AD-1397228.1 | 47 | 7 | 53 | 6 | 62 | 12 |
| AD-1397229.1 | 49 | 9 | 48 | 8 | 53 | 4 |
| AD-1397230.1 | 65 | 25 | 51 | 9 | 61 | 10 |
| AD-1397231.1 | 67 | 26 | 57 | 16 | 61 | 5 |
| AD-1397232.1 | 59 | 25 | 61 | 9 | 75 | 16 |
| AD-1397233.1 | 61 | 15 | 66 | 17 | 93 | 27 |
| AD-1397234.1 | 64 | 17 | 71 | 19 | 88 | 18 |
| AD-1397235.1 | 61 | 19 | 56 | 11 | 90 | 23 |
| AD-1397236.1 | 47 | 11 | 49 | 7 | 57 | 6 |
| AD-1397237.1 | 45 | 9 | 48 | 4 | 61 | 9 |
| AD-1397238.1 | 46 | 7 | 48 | 9 | 51 | 4 |
| AD-1397239.1 | 49 | 10 | 47 | 7 | 55 | 3 |
| AD-1397240.1 | 49 | 11 | 48 | 10 | 68 | 18 |
| AD-1397241.1 | 66 | 23 | 57 | 13 | 72 | 12 |
| AD-1397242.1 | 64 | 15 | 69 | 17 | 91 | 22 |
| AD-1397243.1 | 65 | 28 | 62 | 14 | 78 | 19 |
| AD-1397244.1 | 52 | 20 | 42 | 5 | 64 | 31 |
| AD-1397245.1 | 55 | 12 | 50 | 10 | 66 | 12 |
| AD-1397246.1 | 46 | 12 | 49 | 10 | 54 | 8 |
| AD-1397247.1 | 45 | 10 | 42 | 5 | 47 | 8 |
| AD-1397248.1 | 52 | 13 | 50 | 10 | 55 | 11 |
| AD-1397249.1 | 56 | 13 | 52 | 12 | 58 | 8 |

TABLE 25
Unmodified Sense and Antisense Strand Sequences of MAPT dsRNA Agents- Screen 9

| | | SEQ | | | | SEQ | | |
|---|---|---|---|---|---|---|---|---|
| Duplex | Sense Sequence | ID | | | Antisense Sequence | ID | | |
| Name | 5′ to 3′ | NO: | Source | Range | 5′ to 3′ | NO: | Source | Range |
| AD- | UGGAAAUAAAG | 3223 | NM_001038609. | 5354- | UGAGUAAUAACU | 3252 | NM_001038609. | 5352- |
| 397167.1 | UUAUUACUCA | | 2_5354- | 5374 | UUAUUUCCAAA | | 2_5352-5374_as | 5374 |
| | | | 5374_s | | | | | |
| AD- | AGUGUGCAAAU | 3224 | NM_001038609. | 1065- | UUUGUAGACUAU | 3253 | NM_001038609. | 1063- |
| 393758.4 | AGUCUACAAA | | 2_1065- | 1085 | UUGCACACUGC | | 2_1063- | 1085 |
| | | | 1085_G21U_s | | | | 1085_C1A_as | |
| AD- | UGCAAAUAGUC | 3225 | NM_005910.6 | 1067- | UUGGTUTGUAGA | 3254 | NM_005910.6 | 1065- |
| 1397080.3 | UACAAACCAA | | | 1087 | CUAUUUGCACA | | | 1087 |
| AD- | AAAUAGUCUAC | 3226 | NM_005910.6 | 1070- | UAACTGGUUUGU | 3255 | NM_005910.6 | 1068- |
| 1397293.2 | AAACCAGUUA | | | 1090 | AGACUAUUUGC | | | 1090 |
| AD- | AAUAGUCUACA | 3227 | NM_005910.6 | 1071- | UCAACUGGUUUG | 3256 | NM_005910.6 | 1069- |
| 1397294.2 | AACCAGUUGA | | | 1091 | UAGACUAUUUG | | | 1091 |
| AD- | AUAGUCUACAA | 3228 | NM_005910.6 | 1072- | UUCAACTGGUUU | 3257 | NM_005910.6 | 1070- |
| 1397081.3 | ACCAGUUGAA | | | 1092 | GUAGACUAUUU | | | 1092 |
| AD- | GUCUACAAACC | 3229 | NM_005910.6 | 1075- | UAGGTCAACUGG | 3258 | NM_005910.6 | 1073- |
| 1397083.3 | AGUUGACCUA | | | 1095 | UUUGUAGACUA | | | 1095 |
| AD- | UACAAACCAGU | 3230 | NM_005910.6 | 1078- | UCUCAGGUCAAC | 3259 | NM_005910.6 | 1076- |
| 1397298.2 | UGACCUGAGA | | | 1098 | UGGUUUGUAGA | | | 1098 |
| AD- | ACAAACCAGUU | 3231 | NM_005910.6 | 1079- | UGCUCAGGUCAA | 3260 | NM_005910.6 | 1077- |
| 1397299.2 | GACCUGAGCA | | | 1099 | CUGGUUUGUAG | | | 1099 |
| AD- | AGGCAACAUCC | 3232 | NM_005910.6 | 1125- | UGUUTATGAUGG | 3261 | NM_005910.6 | 1123- |
| 1397084.2 | AUCAUAAACA | | | 1145 | AUGUUGCCUAA | | | 1145 |
| AD- | GGCAACAUCCA | 3233 | NM_005910.6 | 1126- | UGGUTUAUGAUG | 3262 | NM_005910.6 | 1124- |
| 1397085.2 | UCAUAAACCA | | | 1146 | GAUGUUGCCUA | | | 1146 |
| AD- | AACAUCCAUCA | 3234 | NM_005910.6 | 1129- | UCCUGGTUUAUG | 3263 | NM_005910.6 | 1127- |
| 1397087.3 | UAAACCAGGA | | | 1149 | AUGGAUGUUGC | | | 1149 |
| AD- | AUCCAUCAUAA | 3235 | NM_005910.6 | 1132- | UCCUCCTGGUUTA | 3264 | NM_005910.6 | 1 BO- |
| 1397306.2 | ACCAGGAGGA | | | 1152 | UGAUGGAUGU | | | 1152 |
| AD- | UCCAUCAUAAA | 3236 | NM_005910.6 | 1133- | UACCTCCUGGUU | 3265 | NM_005910.6 | 1131- |
| 1397307.2 | CCAGGAGGUA | | | 1153 | UAUGAUGGAUG | | | 1153 |
| AD- | CCAUCAUAAAC | 3237 | NM_005910.6 | 1134- | UCACCUCCUGGT | 3266 | NM_005910.6 | 1132- |
| 1397308.2 | CAGGAGGUGA | | | 1154 | UUAUGAUGGAU | | | 1154 |
| AD- | AUCUGAGAAGC | 3238 | NM_005910.6 | 1170- | UUGAAGTCAAGC | 3267 | NM_005910.6 | 1168- |
| 1397088.2 | UUGACUUCAA | | | 1190 | UUCUCAGAUUU | | | 1190 |
| AD- | CGCAUGGUCAG | 3239 | NM_016841.4 | 524- | UUUGCUUUUACU | 3268 | NM_016841.4_ | 522- |
| 523565.1 | UAAAAGCAAA | | _524- | 544 | GACCAUGCGAG | | 522-544_UlA_as | 544 |
| | | | 544_A21U_s | | | | | |
| AD- | GUGACCCAAGC | 3240 | NM_005910.6 | 514- | UACCAUGCGAGC | 3269 | NM_005910.6 | 512- |
| 1397072.3 | UCGCAUGGUA | | | 534 | UUGGGUCACGU | | | 534 |
| AD- | UGACCCAAGCU | 3241 | NM_005910.6 | 515- | UGACCATGCGAG | 3270 | NM_005910.6 | 513- |
| 1397073.3 | CGCAUGGUCA | | | 535 | CUUGGGUCACG | | | 535 |
| AD- | CCCAAGCUCGC | 3242 | NM_005910.6 | 518- | UACUGACCAUGC | 3271 | NM_005910.6 | 516- |
| 1397076.3 | AUGGUCAGUA | | | 538 | GAGCUUGGGUC | | | 538 |
| AD- | CCAAGCUCGCA | 3243 | NM_005910.6 | 519- | UUACTGACCAUG | 3272 | NM_005910.6 | 517- |
| 1397077.3 | UGGUCAGUAA | | | 539 | CGAGCUUGGGU | | | 539 |
| AD- | CAAGCUCGCAU | 3244 | NM_005910.6 | 520- | UUUACUGACCAU | 3273 | NM_005910.6 | 518- |
| 1397078.3 | GGUCAGUAAA | | | 540 | GCGAGCUUGGG | | | 540 |
| AD- | GCUCGCAUGGU | 3245 | NM_005910.6 | 523- | UCUUTUACUGAC | 3274 | NM_005910.6 | 521- |
| 1397252.2 | CAGUAAAAGA | | | 543 | CAUGCGAGCUU | | | 543 |
| AD- | CAUGGUCAGUA | 3246 | NM_005910.6 | 528- | UCUUTGCUUUUA | 3275 | NM_005910.6 | 526- |
| 1397257.2 | AAAGCAAAGA | | | 548 | CUGACCAUGCG | | | 548 |
| AD- | AUGGUCAGUAA | 3247 | NM_005910.6 | 529- | UUCUTUGCUUUU | 3276 | NM_005910.6 | 527- |
| 1397258.2 | AAGCAAAGAA | | | 549 | ACUGACCAUGC | | | 549 |
| AD- | UGGUCAGUAAA | 3248 | NM_005910.6 | 530- | UGUCTUTGCUUU | 3277 | NM_005910.6 | 528- |
| 1397259.2 | AGCAAAGACA | | | 550 | UACUGACCAUG | | | 550 |
| AD- | CAGUAAAAGCA | 3249 | NM_005910.6 | 534- | UTCCCGTCUUUGC | 3278 | NM_005910.6 | 532- |
| 1397263.2 | AAGACGGGAA | | | 554 | UUUUACUGAC | | | 554 |
| AD- | AGUAAAAGCAA | 3250 | NM_005910.6 | 535- | UGUCCCGUCUUU | 3279 | NM_005910.6 | 533- |
| 1397264.2 | AGACGGGACA | | | 555 | GCUUUUACUGA | | | 555 |
| AD- | CAUCAUAAACC | 3251 | NM_005910.6 | 1135- | UCCACCTCCUGGU | 3280 | NM_005910.6 | 1133- |
| 1397309.2 | AGGAGGUGGA | | | 1155 | UUAUGAUGGA | | | 1155 |

TABLE 26
Modified Sense and Antisense Strand Sequences of MAPT dsRNA Agents- Screen 9

| | | SEQ | | SEQ | mRNA Target | SEQ |
|---|---|---|---|---|---|---|
| | Sense Sequence 5′ to | ID | Antisense Sequence 5′ | ID | Sequence | ID |
| Duplex ID | 3′ | NO: | to 3′ | NO: | 5′ to 3′ | NO: |
| AD-397167.1 | usgsgaaaUfaAfAfGfuu | 3281 | VPusGfsaguAfaUfAfacu | 3310 | UUUGGAAAUAAAG | 3339 |
| | auuacucaL96 | | uUfaUfuuccasasa | | UUAUUACUCU | |
| AD-393758.4 | asgsugugCfaAfAfUfag | 3282 | VPusUfsuguAfgAfCfuau | 3311 | GCAGUGUGCAAAU | 3340 |
| | ucuacaaaL96 | | uUfgCfacacusgsc | | AGUCUACAAG | |
| AD-1397080.3 | usgscaa(Ahd)uaGfUfC | 3283 | VPusUfsggdTu(Tgn)gua | 3312 | UGUGCAAAUAGUC | 3341 |
| | fuacaaaccaaL96 | | gacUfaUfuugcascsa | | UACAAACCAG | |
| AD-1397293.2 | asasaua(Ghd)ucUfAfCf | 3284 | VPusAfsacdTg(G2p)uuu | 3313 | GCAAAUAGUCUAC | 3342 |
| | aaaccaguuaL96 | | guaGfaCfuauuusgsc | | AAACCAGUUG | |
| AD-1397294.2 | asasuag(Uhd)cuAfCfA | 3285 | VPusdCsaadCudGguuud | 3314 | CAAAUAGUCUACA | 3343 |
| | faaccaguugaL96 | | GuAfgacuauususg | | AACCAGUUGA | |
| AD-1397081.3 | asusagu(Chd)uaCfAfA | 3286 | VPusUfscadAc(Tgn)ggu | 3315 | AAAUAGUCUACAA | 3344 |
| | faccaguugaaL96 | | uugUfaGfacuaususu | | ACCAGUUGAC | |
| AD-1397083.3 | gsuscua(Chd)aaAfCfCf | 3287 | VPusAfsggdTc(Agn)acu | 3316 | UAGUCUACAAACC | 3345 |
| | aguugaccuaL96 | | gguUfuGfuagacsusa | | AGUUGACCUG | |
| AD-1397298.2 | usascaa(Ahd)ccAfGfUf | 3288 | VPusCfsucdAg(G2p)uca | 3317 | UCUACAAACCAGU | 3346 |
| | ugaccugagaL96 | | acuGfgUfuuguasgsa | | UGACCUGAGC | |
| AD-1397299.2 | ascsaaa(Chd)caGfUfUf | 3289 | VPusGfscudCa(G2p)guc | 3318 | CUACAAACCAGUU | 3347 |
| | gaccugagcaL96 | | aacUfgGfuuugusasg | | GACCUGAGCA | |
| AD-1397084.2 | asgsgca(Ahd)caUfCfCf | 3290 | VPusGfsuudTa(Tgn)gau | 3319 | UUAGGCAACAUCC | 3348 |
| | aucauaaacaL96 | | ggaUfgUfugccusasa | | AUCAUAAACC | |
| AD-1397085.2 | gsgscaa(Chd)auCfCfAf | 3291 | VPusGfsgudTu(Agn)uga | 3320 | UAGGCAACAUCCA | 3349 |
| | ucauaaaccaL96 | | uggAfuGfuugccsusa | | UCAUAAACCA | |
| AD-1397087.3 | asascau(Chd)caUfCfAf | 3292 | VPusCfscudGg(Tgn)uua | 3321 | GCAACAUCCAUCA | 3350 |
| | uaaaccaggaL96 | | ugaUfgGfauguusgsc | | UAAACCAGGA | |
| AD-1397306.2 | asuscca(Uhd)caUfAfAf | 3293 | VPusdCscudCcdTgguud | 3322 | ACAUCCAUCAUAA | 3351 |
| | accaggaggaL96 | | TaUfgauggausgsu | | ACCAGGAGGU | |
| AD-1397307.2 | uscscau(Chd)auAfAfA | 3294 | VPusAfsccdTc(C2p)ugg | 3323 | CAUCCAUCAUAAA | 3352 |
| | fccaggagguaL96 | | uuuAfuGfauggasusg | | CCAGGAGGUG | |
| AD-1397308.2 | cscsauc(Ahd)uaAfAfCf | 3295 | VPusdCsacdCudCcuggd | 3324 | AUCCAUCAUAAAC | 3353 |
| | caggaggugaL96 | | TuUfaugauggsasu | | CAGGAGGUGG | |
| AD-1397088.2 | asuscug(Ahd)gaAfGfC | 3296 | VPusUfsgadAg(Tgn)caa | 3325 | AAAUCUGAGAAGC | 3354 |
| | fuugacuucaaL96 | | gcuUfcUfcagaususu | | UUGACUUCAA | |
| AD-523565.1 | csgscaugGfuCfAfGfua | 3297 | VPusUfsugcUfuUfUfacu | 3326 | CUCGCAUGGUCAG | 3355 |
| | aaagcaaaL96 | | gAfcCfaugcgsasg | | UAAAAGCAAA | |
| AD-1397072.3 | gsusgac(Chd)caAfGfCf | 3298 | VPusAfsccdAu(G2p)cga | 3327 | ACGUGACCCAAGC | 3356 |
| | ucgcaugguaL96 | | gcuUfgGfgucacsgsu | | UCGCAUGGUC | |
| AD-1397073.3 | usgsacc(Chd)aaGfCfUf | 3299 | VPusdGsacdCadTgcgad | 3328 | CGUGACCCAAGCU | 3357 |
| | cgcauggucaL96 | | GcUfugggucascsg | | CGCAUGGUCA | |
| AD-1397076.3 | cscscaa(Ghd)cuCfGfCf | 3300 | VPusAfscudGa(C2p)cau | 3329 | GACCCAAGCUCGC | 3358 |
| | auggucaguaL96 | | gcgAfgCfuugggsusc | | AUGGUCAGUA | |
| AD-1397077.3 | cscsaag(Chd)ucGfCfAf | 3301 | VPusUfsacdTg(Agn)cca | 3330 | ACCCAAGCUCGCA | 3359 |
| | uggucaguaaL96 | | ugcGfaGfcuuggsgsu | | UGGUCAGUAA | |
| AD-1397078.3 | csasagc(Uhd)cgCfAfUf | 3302 | VPusUfsuadCu(G2p)acc | 3331 | CCCAAGCUCGCAU | 3360 |
| | ggucaguaaaL96 | | augCfgAfgcuugsgsg | | GGUCAGUAAA | |
| AD-1397252.2 | gscsucg(Chd)auGfGfU | 3303 | VPusdCsuudTudAcugad | 3332 | AAGCUCGCAUGGU | 3361 |
| | fcaguaaaagaL96 | | CcAfugcgagcsusu | | CAGUAAAAGC | |
| AD-1397257.2 | csasugg(Uhd)caGfUfA | 3304 | VPusCfsuudTg(C2p)uuu | 3333 | CGCAUGGUCAGUA | 3362 |
| | faaagcaaagaL96 | | uacUfgAfccaugscsg | | AAAGCAAAGA | |
| AD-1397258.2 | asusggu(Chd)agUfAfA | 3305 | VPusUfscudTu(G2p)cuu | 3334 | GCAUGGUCAGUAA | 3363 |
| | faagcaaagaaL96 | | uuaCfuGfaccausgsc | | AAGCAAAGAC | |
| AD-1397259.2 | usgsguc(Ahd)guAfAfA | 3306 | VPusGfsucdTu(Tgn)gcu | 3335 | CAUGGUCAGUAAA | 3364 |
| | fagcaaagacaL96 | | uuuAfcUfgaccasusg | | AGCAAAGACG | |
| AD-1397263.2 | csasgua(Ahd)aaGfCfAf | 3307 | VPusdTsccdCgdTcuuud | 3336 | GUCAGUAAAAGCA | 3365 |
| | aagacgggaaL96 | | GcUfuuuacugsasc | | AAGACGGGAC | |
| AD-1397264.2 | asgsuaa(Ahd)agCfAfA | 3308 | VPusGfsucdCc(G2p)ucu | 3337 | UCAGUAAAAGCAA | 3366 |
| | fagacgggacaL96 | | uugCfuUfuuacusgsa | | AGACGGGACU | |
| AD-1397309.2 | csasuca(Uhd)aaAfCfCf | 3309 | VPusdCscadCcdTccugd | 3338 | UCCAUCAUAAACC | 3367 |
| | aggagguggaL96 | | GuUfuaugaugsgsa | | AGGAGGUGGC | |

TABLE 27
Unmodified Sense and Antisense Strand Sequences of MAPT dsRNA Agents- Screen 10

| Duplex | Sense Sequence | SEQ ID | Range in | Antisense Sequence | SEQ ID | Range in |
|---|---|---|---|---|---|---|
| Name | 5′ to 3′ | NO: | NM_005910.6 | 5′ to 3′ | NO: | NM_005910.6 |
| AD-1566238 | ACGUGACCCAAGCU | 3368 | 512-532 | UCAUGCGAGCUUG | 3457 | 510-532 |
| | CGCAUGA | | | GGUCACGUGA | | |
| AD-1566239 | CGUGACCCAAGCUC | 3369 | 513-533 | UCCAUGCGAGCUU | 3458 | 511-533 |
| | GCAUGGA | | | GGGUCACGUG | | |
| AD-1566240 | GUGACCCAAGCUCG | 3370 | 514-534 | UACCAUGCGAGCU | 3459 | 512-534 |
| | CAUGGUA | | | UGGGUCACGU | | |
| AD-1566241 | UGACCCAAGCUCGC | 3371 | 515-535 | UGACCAUGCGAGC | 3460 | 513-535 |
| | AUGGUCA | | | UUGGGUCACG | | |
| AD-1566242 | GACCCAAGCUCGCA | 3372 | 516-536 | UUGACCAUGCGAG | 3461 | 514-536 |
| | UGGUCAA | | | CUUGGGUCAC | | |
| AD-1566243 | ACCCAAGCUCGCAU | 3373 | 517-537 | UCUGACCAUGCGA | 3462 | 515-537 |
| | GGUCAGA | | | GCUUGGGUCA | | |
| AD-1566244 | CCCAAGCUCGCAUG | 3374 | 518-538 | UACUGACCAUGCG | 3463 | 516-538 |
| | GUCAGUA | | | AGCUUGGGUC | | |
| AD-1566245 | CCAAGCUCGCAUGG | 3375 | 519-539 | UUACUGACCAUGC | 3464 | 517-539 |
| | UCAGUAA | | | GAGCUUGGGU | | |
| AD-1566246 | CAAGCUCGCAUGGU | 3376 | 520-540 | UUUACUGACCAUG | 3465 | 518-540 |
| | CAGUAAA | | | CGAGCUUGGG | | |
| AD-1091965 | AGCUCGCAUGGUCA | 3377 | 522-542 | UUUUUACUGACCA | 3466 | 520-542 |
| | GUAAAAA | | | UGCGAGCUUG | | |
| AD-1566248 | GCUCGCAUGGUCAG | 3378 | 523-543 | UCUUUUACUGACC | 3467 | 521-543 |
| | UAAAAGA | | | AUGCGAGCUU | | |
| AD-1566249 | CUCGCAUGGUCAGU | 3379 | 524-544 | UGCUUUUACUGAC | 3468 | 522-544 |
| | AAAAGCA | | | CAUGCGAGCU | | |
| AD-1566250 | UCGCAUGGUCAGUA | 3380 | 525-545 | UUGCUUUUACUGA | 3469 | 523-545 |
| | AAAGCAA | | | CCAUGCGAGC | | |
| AD-1091966 | CGCAUGGUCAGUAA | 3381 | 526-546 | UUUGCUUUUACUG | 3470 | 524-546 |
| | AAGCAAA | | | ACCAUGCGAG | | |
| AD-1566251 | GCAUGGUCAGUAAA | 3382 | 527-547 | UUUUGCUUUUACU | 3471 | 525-547 |
| | AGCAAAA | | | GACCAUGCGA | | |
| AD-1566252 | CAUGGUCAGUAAAA | 3383 | 528-548 | UCUUUGCUUUUAC | 3472 | 526-548 |
| | GCAAAGA | | | UGACCAUGCG | | |
| AD-1566253 | AUGGUCAGUAAAAG | 3384 | 529-549 | UUCUUUGCUUUUA | 3473 | 527-549 |
| | CAAAGAA | | | CUGACCAUGC | | |
| AD-1566254 | UGGUCAGUAAAAGC | 3385 | 530-550 | UGUCUUUGCUUUU | 3474 | 528-550 |
| | AAAGACA | | | ACUGACCAUG | | |
| AD-1566255 | GGUCAGUAAAAGCA | 3386 | 531-551 | UCGUCUUUGCUUU | 3475 | 529-551 |
| | AAGACGA | | | UACUGACCAU | | |
| AD-1566256 | GUCAGUAAAAGCAA | 3387 | 532-552 | UCCGUCUUUGCUU | 3476 | 530-552 |
| | AGACGGA | | | UUACUGACCA | | |
| AD-1566257 | UCAGUAAAAGCAAA | 3388 | 533-553 | UCCCGUCUUUGCUU | 3477 | 531-553 |
| | GACGGGA | | | UUACUGACC | | |
| AD-1566258 | CAGUAAAAGCAAAG | 3389 | 534-554 | UUCCCGUCUUUGCU | 3478 | 532-554 |
| | ACGGGAA | | | UUUACUGAC | | |
| AD-1566259 | AGUAAAAGCAAAGA | 3390 | 535-555 | UGUCCCGUCUUUGC | 3479 | 533-555 |
| | CGGGACA | | | UUUUACUGA | | |
| AD-692906 | AGUGUGCAAAUAGU | 3391 | 1063-1083 | UUUGUAGACUAUU | 3480 | 1061-1083 |
| | CUACAAA | | | UGCACACUGC | | |
| AD-1566575 | GUGCAAAUAGUCUA | 3392 | 1066-1086 | UGGUUUGUAGACU | 3481 | 1064-1086 |
| | CAAACCA | | | AUUUGCACAC | | |
| AD-1566576 | UGCAAAUAGUCUAC | 3393 | 1067-1087 | UUGGUUUGUAGAC | 3482 | 1065-1087 |
| | AAACCAA | | | UAUUUGCACA | | |
| AD-1566577 | GCAAAUAGUCUACA | 3394 | 1068-1088 | UCUGGUUUGUAGA | 3483 | 1066-1088 |
| | AACCAGA | | | CUAUUUGCAC | | |
| AD-1566580 | AAUAGUCUACAAAC | 3395 | 1071-1091 | UCAACUGGUUUGU | 3484 | 1069-1091 |
| | CAGUUGA | | | AGACUAUUUG | | |
| AD-1566581 | AUAGUCUACAAACC | 3396 | 1072-1092 | UUCAACUGGUUUG | 3485 | 1070-1092 |
| | AGUUGAA | | | UAGACUAUUU | | |
| AD-1566582 | UAGUCUACAAACCA | 3397 | 1073-1093 | UGUCAACUGGUUU | 3486 | 1071-1093 |
| | GUUGACA | | | GUAGACUAUU | | |
| AD-1566583 | AGUCUACAAACCAG | 3398 | 1074-1094 | UGGUCAACUGGUU | 3487 | 1072-1094 |
| | UUGACCA | | | UGUAGACUAU | | |
| AD-1566584 | GUCUACAAACCAGU | 3399 | 1075-1095 | UAGGUCAACUGGU | 3488 | 1073-1095 |
| | UGACCUA | | | UUGUAGACUA | | |
| AD-1566586 | CUACAAACCAGUUG | 3400 | 1077-1097 | UUCAGGUCAACUG | 3489 | 1075-1097 |
| | ACCUGAA | | | GUUUGUAGAC | | |
| AD-1566587 | UACAAACCAGUUGA | 3401 | 1078-1098 | UCUCAGGUCAACU | 3490 | 1076-1098 |
| | CCUGAGA | | | GGUUUGUAGA | | |
| AD-1566588 | ACAAACCAGUUGAC | 3402 | 1079-1099 | UGCUCAGGUCAAC | 3491 | 1077-1099 |
| | CUGAGCA | | | UGGUUUGUAG | | |
| AD-1566590 | AAACCAGUUGACCU | 3403 | 1081-1101 | UUUGCUCAGGUCA | 3492 | 1079-1101 |
| | GAGCAAA | | | ACUGGUUUGU | | |
| AD-1566591 | AACCAGUUGACCUG | 3404 | 1082-1102 | UCUUGCUCAGGUC | 3493 | 1080-1102 |
| | AGCAAGA | | | AACUGGUUUG | | |
| AD-1566634 | AGGCAACAUCCAUC | 3405 | 1125-1145 | UGUUUAUGAUGGA | 3494 | 1123-1145 |
| | AUAAACA | | | UGUUGCCUAA | | |
| AD-1566635 | GGCAACAUCCAUCA | 3406 | 1126-1146 | UGGUUUAUGAUGG | 3495 | 1124-1146 |
| | UAAACCA | | | AUGUUGCCUA | | |
| AD-1566638 | AACAUCCAUCAUAA | 3407 | 1129-1149 | UCCUGGUUUAUGA | 3496 | 1127-1149 |
| | ACCAGGA | | | UGGAUGUUGC | | |
| AD-1566639 | ACAUCCAUCAUAAA | 3408 | 1130-1150 | UUCCUGGUUUAUG | 3497 | 1128-1150 |
| | CCAGGAA | | | AUGGAUGUUG | | |
| AD-1566641 | AUCCAUCAUAAACC | 3409 | 1132-1152 | UCCUCCUGGUUUA | 3498 | 1130-1152 |
| | AGGAGGA | | | UGAUGGAUGU | | |
| AD-1566642 | UCCAUCAUAAACCA | 3410 | 1133-1153 | UACCUCCUGGUUU | 3499 | 1131-1153 |
| | GGAGGUA | | | AUGAUGGAUG | | |
| AD-1566643 | CCAUCAUAAACCAG | 3411 | 1134-1154 | UCACCUCCUGGUUU | 3500 | 1132-1154 |
| | GAGGUGA | | | AUGAUGGAU | | |
| AD-1566679 | AUCUGAGAAGCUUG | 3412 | 1170-1190 | UUGAAGUCAAGCU | 3501 | 1168-1190 |
| | ACUUCAA | | | UCUCAGAUUU | | |
| AD-1566861 | CAGCAUCGACAUGG | 3413 | 1395-1415 | UAGUCUACCAUGU | 3502 | 1393-1415 |
| | UAGACUA | | | CGAUGCUGCC | | |
| AD-1567153 | UGGCAGCAACAAAG | 3414 | 1905-1925 | UCAAAUCCUUUGU | 3503 | 1903-1925 |
| | GAUUUGA | | | UGCUGCCACU | | |
| AD-1567154 | GGCAGCAACAAAGG | 3415 | 1906-1926 | UUCAAAUCCUUUG | 3504 | 1904-1926 |
| | AUUUGAA | | | UUGCUGCCAC | | |
| AD-1567157 | AGCAACAAAGGAUU | 3416 | 1909-1929 | UGUUUCAAAUCCU | 3505 | 1907-1929 |
| | UGAAACA | | | UUGUUGCUGC | | |
| AD-1567159 | CAACAAAGGAUUUG | 3417 | 1911-1931 | UAAGUUUCAAAUC | 3506 | 1909-1931 |
| | AAACUUA | | | CUUUGUUGCU | | |
| AD-1567160 | AACAAAGGAUUUGA | 3418 | 1912-1932 | UCAAGUUUCAAAU | 3507 | 1910-1932 |
| | AACUUGA | | | CCUUUGUUGC | | |
| AD-1567161 | ACAAAGGAUUUGAA | 3419 | 1913-1933 | UCCAAGUUUCAAA | 3508 | 1911-1933 |
| | ACUUGGA | | | UCCUUUGUUG | | |
| AD-1567164 | AAGGAUUUGAAACU | 3420 | 1916-1936 | UACACCAAGUUUC | 3509 | 1914-1936 |
| | UGGUGUA | | | AAAUCCUUUG | | |
| AD-1567167 | GAUUUGAAACUUGG | 3421 | 1919-1939 | UAACACACCAAGU | 3510 | 1917-1939 |
| | UGUGUUA | | | UUCAAAUCCU | | |
| AD-1567199 | GGCAGACGAUGUCA | 3422 | 1951-1971 | UCAAGGUUGACAU | 3511 | 1949-1971 |
| | ACCUUGA | | | CGUCUGCCUG | | |
| AD-1567202 | AGACGAUGUCAACC | 3423 | 1954-1974 | UACACAAGGUUGA | 3512 | 1952-1974 |
| | UUGUGUA | | | CAUCGUCUGC | | |
| AD-1567550 | GGCUAACCAGUUCU | 3424 | 2472-2492 | UACAAAGAGAACU | 3513 | 2470-2492 |
| | CUUUGUA | | | GGUUAGCCCU | | |
| AD-1567554 | AACCAGUUCUCUUU | 3425 | 2476-2496 | UCCUUACAAAGAG | 3514 | 2474-2496 |
| | GUAAGGA | | | AACUGGUUAG | | |
| AD-1567784 | UCUCAGUUCCACUC | 3426 | 2828-2848 | UUUGGAUGAGUGG | 3515 | 2826-2848 |
| | AUCCAAA | | | AACUGAGAGU | | |
| AD-1567896 | UAGGUGUUUCUGCC | 3427 | 2943-2963 | UCAACAAGGCAGA | 3516 | 2941-2963 |
| | UUGUUGA | | | AACACCUAGG | | |
| AD-1567897 | AGGUGUUUCUGCCU | 3428 | 2944-2964 | UUCAACAAGGCAG | 3517 | 2942-2964 |
| | UGUUGAA | | | AAACACCUAG | | |
| AD-1568105 | AGCAGCUGAACAUA | 3429 | 3277-3297 | UUAUGUAUAUGUU | 3518 | 3275-3297 |
| | UACAUAA | | | CAGCUGCUCC | | |
| AD-1568108 | AGCUGAACAUAUAC | 3430 | 3280-3300 | UAUCUAUGUAUAU | 3519 | 3278-3300 |
| | AUAGAUA | | | GUUCAGCUGC | | |
| AD-1568109 | GCUGAACAUAUACA | 3431 | 3281-3301 | UCAUCUAUGUAUA | 3520 | 3279-3301 |
| | UAGAUGA | | | UGUUCAGCUG | | |
| AD-1568139 | GAGUUGUAGUUGGA | 3432 | 3331-3351 | UGACAAAUCCAAC | 3521 | 3329-3351 |
| | UUUGUCA | | | UACAACUCAA | | |
| AD-1568140 | AGUUGUAGUUGGAU | 3433 | 3332-3352 | UAGACAAAUCCAA | 3522 | 3330-3352 |
| | UUGUCUA | | | CUACAACUCA | | |
| AD-1568143 | UGUAGUUGGAUUUG | 3434 | 3335-3355 | UAACAGACAAAUC | 3523 | 3333-3355 |
| | UCUGUUA | | | CAACUACAAC | | |
| AD-1568144 | GUAGUUGGAUUUGU | 3435 | 3336-3356 | UAAACAGACAAAU | 3524 | 3334-3356 |
| | CUGUUUA | | | CCAACUACAA | | |
| AD-1568148 | UUGGAUUUGUCUGU | 3436 | 3340-3360 | UGCAUAAACAGAC | 3525 | 3338-3360 |
| | UUAUGCA | | | AAAUCCAACU | | |
| AD-1568150 | GGAUUUGUCUGUUU | 3437 | 3342-3362 | UAAGCAUAAACAG | 3526 | 3340-3362 |
| | AUGCUUA | | | ACAAAUCCAA | | |
| AD-1568151 | GAUUUGUCUGUUUA | 3438 | 3343-3363 | UCAAGCAUAAACA | 3527 | 3341-3363 |
| | UGCUUGA | | | GACAAAUCCA | | |
| AD-1568152 | AUUUGUCUGUUUAU | 3439 | 3344-3364 | UCCAAGCAUAAAC | 3528 | 3342-3364 |
| | GCUUGGA | | | AGACAAAUCC | | |
| AD-1568153 | UUUGUCUGUUUAUG | 3440 | 3345-3365 | UUCCAAGCAUAAA | 3529 | 3343-3365 |
| | CUUGGAA | | | CAGACAAAUC | | |
| AD-1568154 | UUGUCUGUUUAUGC | 3441 | 3346-3366 | UAUCCAAGCAUAA | 3530 | 3344-3366 |
| | UUGGAUA | | | ACAGACAAAU | | |
| AD-1568158 | CUGUUUAUGCUUGG | 3442 | 3350-3370 | UGUGAAUCCAAGC | 3531 | 3348-3370 |
| | AUUCACA | | | AUAAACAGAC | | |
| AD-1568161 | UUUAUGCUUGGAUU | 3443 | 3353-3373 | UCUGGUGAAUCCA | 3532 | 3351-3373 |
| | CACCAGA | | | AGCAUAAACA | | |
| AD-1568172 | AUUCACCAGAGUGA | 3444 | 3364-3384 | UUCAUAGUCACUC | 3533 | 3362-3384 |
| | CUAUGAA | | | UGGUGAAUCC | | |
| AD-1568174 | UCACCAGAGUGACU | 3445 | 3366-3386 | UUAUCAUAGUCAC | 3534 | 3364-3386 |
| | AUGAUAA | | | UCUGGUGAAU | | |
| AD-1568175 | CACCAGAGUGACUA | 3446 | 3367-3387 | UCUAUCAUAGUCA | 3535 | 3365-3387 |
| | UGAUAGA | | | CUCUGGUGAA | | |
| AD-692908 | ACCAGAGUGACUAU | 3447 | 3368-3388 | UACUAUCAUAGUC | 3536 | 3366-3388 |
| | GAUAGUA | | | ACUCUGGUGA | | |
| AD-1568176 | CCAGAGUGACUAUG | 3448 | 3369-3389 | UCACUAUCAUAGU | 3537 | 3367-3389 |
| | AUAGUGA | | | CACUCUGGUG | | |
| AD-1569830 | ACAUGAAAUCAUCU | 3449 | 5509-5529 | UAAGCUAAGAUGA | 3538 | 5507-5529 |
| | UAGCUUA | | | UUUCAUGUCC | | |
| AD-1569832 | AUGAAAUCAUCUUA | 3450 | 5511-5531 | UCUAAGCUAAGAU | 3539 | 5509-5531 |
| | GCUUAGA | | | GAUUUCAUGU | | |
| AD-1569834 | GAAAUCAUCUUAGC | 3451 | 5513-5533 | UAGCUAAGCUAAG | 3540 | 5511-5533 |
| | UUAGCUA | | | AUGAUUUCAU | | |
| AD-1569835 | AAAUCAUCUUAGCU | 3452 | 5514-5534 | UAAGCUAAGCUAA | 3541 | 5512-5534 |
| | UAGCUUA | | | GAUGAUUUCA | | |
| AD-1569862 | GUGAAUGUCUAUAU | 3453 | 5541-5561 | UUACACUAUAUAG | 3542 | 5539-5561 |
| | AGUGUAA | | | ACAUUCACAG | | |
| AD-1569872 | AUAUAGUGUAUUGU | 3454 | 5551-5571 | UAAACACACAAUA | 3543 | 5549-5571 |
| | GUGUUUA | | | CACUAUAUAG | | |
| AD-1569890 | CAAAUGAUUUACAC | 3455 | 5574-5594 | UCAGUCAGUGUAA | 3544 | 5572-5594 |
| | UGACUGA | | | AUCAUUUGUU | | |
| AD-1569892 | AAUGAUUUACACUG | 3456 | 5576-5596 | UAACAGUCAGUGU | 3545 | 5574-5596 |
| | ACUGUUA | | | AAAUCAUUUG | | |

TABLE 28
Modified Sense and Antisense Strand Sequences of MAPT dsRNA Agents- Screen 10

| | | SEQ | | SEQ | mRNA Target | SEQ |
|---|---|---|---|---|---|---|
| | Sense Sequence 5′ to | ID | Antisense Sequence 5′ | ID | Sequence | ID |
| Duplex ID | 3′ | NO: | to 3′ | NO: | 5′ to 3′ | NO: |
| AD-1566238 | ascsgug(Ahd)CfcCfAf | 3546 | VPusCfsaugCfgAfGfcuu | 3635 | UCACGUGACCCAA | 1894 |
| | Afgcucgcausgsa | | gGfgUfcacgusgsa | | GCUCGCAUGG | |
| AD-1566239 | csgsuga(Chd)CfcAfAf | 3547 | VPusCfscauGfcGfAfgcu | 3636 | CACGUGACCCAAG | 1895 |
| | Gfcucgcaugsgsa | | uGfgGfucacgsusg | | CUCGCAUGGU | |
| AD-1566240 | gsusgac(Chd)CfaAfGf | 3548 | VPusAfsccaUfgCfGfagc | 3637 | ACGUGACCCAAGC | 1896 |
| | Cfucgcauggsusa | | uUfgGfgucacsgsu | | UCGCAUGGUC | |
| AD-1566241 | usgsacc(Chd)AfaGfCf | 3549 | VPusGfsaccAfuGfCfgag | 3638 | CGUGACCCAAGCU | 1897 |
| | Ufcgcaugguscsa | | cUfuGfggucascsg | | CGCAUGGUCA | |
| AD-1566242 | gsasccc(Ahd)AfgCfUf | 3550 | VPusUfsgacCfaUfGfcga | 3639 | GUGACCCAAGCUC | 1898 |
| | Cfgcauggucsasa | | gCfuUfgggucsasc | | GCAUGGUCAG | |
| AD-1566243 | ascscca(Ahd)GfcUfCf | 3551 | VPusCfsugaCfcAfUfgcg | 3640 | UGACCCAAGCUCG | 1899 |
| | Gfcauggucasgsa | | aGfcUfuggguscsa | | CAUGGUCAGU | |
| AD-1566244 | cscscaa(Ghd)CfuCfGf | 3552 | VPusAfscugAfcCfAfugc | 3641 | GACCCAAGCUCGC | 1900 |
| | Cfauggucagsusa | | gAfgCfuugggsusc | | AUGGUCAGUA | |
| AD-1566245 | cscsaag(Chd)UfcGfCf | 3553 | VPusUfsacuGfaCfCfaug | 3642 | ACCCAAGCUCGCA | 1901 |
| | Afuggucagusasa | | cGfaGfcuuggsgsu | | UGGUCAGUAA | |
| AD-1566246 | csasagc(Uhd)CfgCfAf | 3554 | VPusUfsuacUfgAfCfcau | 3643 | CCCAAGCUCGCAU | 1902 |
| | Ufggucaguasasa | | gCfgAfgcuugsgsg | | GGUCAGUAAA | |
| AD-1091965 | asgscuc(Ghd)CfaUfGf | 3555 | VPusUfsuuuAfcUfGfacc | 3644 | CAAGCUCGCAUGG | 740 |
| | Gfucaguaaasasa | | aUfgCfgagcususg | | UCAGUAAAAG | |
| AD-1566248 | gscsucg(Chd)AfuGfGf | 3556 | VPusCfsuuuUfaCfUfgac | 3645 | AAGCUCGCAUGGU | 741 |
| | Ufcaguaaaasgsa | | cAfuGfcgagcsusu | | CAGUAAAAGC | |
| AD-1566249 | csuscgc(Ahd)UfgGfUf | 3557 | VPusGfscuuUfuAfCfuga | 3646 | AGCUCGCAUGGUC | 2797 |
| | Cfaguaaaagscsa | | cCfaUfgcgagscsu | | AGUAAAAGCA | |
| AD-1566250 | uscsgca(Uhd)GfgUfCf | 3558 | VPusUfsgcuUfuUfAfcug | 3647 | GCUCGCAUGGUCA | 2798 |
| | Afguaaaagcsasa | | aCfcAfugcgasgsc | | GUAAAAGCAA | |
| AD-1091966 | csgscau(Ghd)GfuCfAf | 3559 | VPusUfsugcUfuUfUfacu | 3648 | CUCGCAUGGUCAG | 1201 |
| | Gfuaaaagcasasa | | gAfcCfaugcgsasg | | UAAAAGCAAA | |
| AD-1566251 | gscsaug(Ghd)UfcAfGf | 3560 | VPusUfsuugCfuUfUfuac | 3649 | UCGCAUGGUCAGU | 2800 |
| | Ufaaaagcaasasa | | uGfaCfcaugcsgsa | | AAAAGCAAAG | |
| AD-1566252 | csasugg(Uhd)CfaGfUf | 3561 | VPusCfsuuuGfcUfUfuua | 3650 | CGCAUGGUCAGUA | 2801 |
| | Afaaagcaaasgsa | | cUfgAfccaugscsg | | AAAGCAAAGA | |
| AD-1566253 | asusggu(Chd)AfgUfAf | 3562 | VPusUfscuuUfgCfUfuuu | 3651 | GCAUGGUCAGUAA | 2802 |
| | Afaagcaaagsasa | | aCfuGfaccausgsc | | AAGCAAAGAC | |
| AD-1566254 | usgsguc(Ahd)GfuAfAf | 3563 | VPusGfsucuUfuGfCfuuu | 3652 | CAUGGUCAGUAAA | 2803 |
| | Afagcaaagascsa | | uAfcUfgaccasusg | | AGCAAAGACG | |
| AD-1566255 | gsgsuca(Ghd)UfaAfAf | 3564 | VPusCfsgucUfuUfGfcuu | 3653 | AUGGUCAGUAAAA | 2804 |
| | Afgcaaagacsgsa | | uUfaCfugaccsasu | | GCAAAGACGG | |
| AD-1566256 | gsuscag(Uhd)AfaAfAf | 3565 | VPusCfscguCfuUfUfgcu | 3654 | UGGUCAGUAAAAG | 2805 |
| | Gfcaaagacgsgsa | | uUfuAfcugacscsa | | CAAAGACGGG | |
| AD-1566257 | uscsagu(Ahd)AfaAfGf | 3566 | VPusCfsccgUfcUfUfugc | 3655 | GGUCAGUAAAAGC | 2806 |
| | Cfaaagacggsgsa | | uUfuUfacugascsc | | AAAGACGGGA | |
| AD-1566258 | csasgua(Ahd)AfaGfCf | 3567 | VPusUfscccGfuCfUfuug | 3656 | GUCAGUAAAAGCA | 2807 |
| | Afaagacgggsasa | | cUfuUfuacugsasc | | AAGACGGGAC | |
| AD-1566259 | asgsuaa(Ahd)AfgCfAf | 3568 | VPusGfsuccCfgUfCfuuu | 3657 | UCAGUAAAAGCAA | 2808 |
| | Afagacgggascsa | | gCfuUfuuacusgsa | | AGACGGGACU | |
| AD-692906 | asgsugu(Ghd)CfaAfAf | 3569 | VPusUfsuguAfgAfCfuau | 3658 | GCAGUGUGCAAAU | 1903 |
| | Ufagucuacasasa | | uUfgCfacacusgsc | | AGUCUACAAA | |
| AD-1566575 | gsusgca(Ahd)AfuAfGf | 3570 | VPusGfsguuUfgUfAfgac | 3659 | GUGUGCAAAUAGU | 2835 |
| | Ufcuacaaacscsa | | uAfuUfugcacsasc | | CUACAAACCA | |
| AD-1566576 | usgscaa(Ahd)UfaGfUf | 3571 | VPusUfsgguUfuGfUfaga | 3660 | UGUGCAAAUAGUC | 1904 |
| | Cfuacaaaccsasa | | cUfaUfuugcascsa | | UACAAACCAG | |
| AD-1566577 | gscsaaa(Uhd)AfgUfCf | 3572 | VPusCfsuggUfuUfGfuag | 3661 | GUGCAAAUAGUCU | 315 |
| | Ufacaaaccasgsa | | aCfuAfuuugcsasc | | ACAAACCAGU | |
| AD-1566580 | asasuag(Uhd)CfuAfCf | 3573 | VPusCfsaacUfgGfUfuug | 3662 | CAAAUAGUCUACA | 321 |
| | Afaaccaguusgsa | | uAfgAfcuauususg | | AACCAGUUGA | |
| AD-1566581 | asusagu(Chd)UfaCfAf | 3574 | VPusUfscaaCfuGfGfuuu | 3663 | AAAUAGUCUACAA | 313 |
| | Afaccaguugsasa | | gUfaGfacuaususu | | ACCAGUUGAC | |
| AD-1566582 | usasguc(Uhd)AfcAfAf | 3575 | VPusGfsucaAfcUfGfguu | 3664 | AAUAGUCUACAAA | 324 |
| | Afccaguugascsa | | uGfuAfgacuasusu | | CCAGUUGACC | |
| AD-1566583 | asgsucu(Ahd)CfaAfAf | 3576 | VPusGfsgucAfaCfUfggu | 3665 | AUAGUCUACAAAC | 319 |
| | Cfcaguugacscsa | | uUfgUfagacusasu | | CAGUUGACCU | |
| AD-1566584 | gsuscua(Chd)AfaAfCf | 3577 | VPusAfsgguCfaAfCfugg | 3666 | UAGUCUACAAACC | 314 |
| | Cfaguugaccsusa | | uUfuGfuagacsusa | | AGUUGACCUG | |
| AD-1566586 | csusaca(Ahd)AfcCfAf | 3578 | VPusUfscagGfuCfAfacu | 3667 | GUCUACAAACCAG | 334 |
| | Gfuugaccugsasa | | gGfuUfuguagsasc | | UUGACCUGAG | |
| AD-1566587 | usascaa(Ahd)CfcAfGf | 3579 | VPusCfsucaGfgUfCfaac | 3668 | UCUACAAACCAGU | 332 |
| | Ufugaccugasgsa | | uGfgUfuuguasgsa | | UGACCUGAGC | |
| AD-1566588 | ascsaaa(Chd)CfaGfUf | 3580 | VPusGfscucAfgGfUfcaa | 3669 | CUACAAACCAGUU | 353 |
| | Ufgaccugagscsa | | cUfgGfuuugusasg | | GACCUGAGCA | |
| AD-1566590 | asasacc(Ahd)GfuUfGf | 3581 | VPusUfsugcUfcAfGfguc | 3670 | ACAAACCAGUUGA | 337 |
| | Afccugagcasasa | | aAfcUfgguuusgsu | | CCUGAGCAAG | |
| AD-1566591 | asascca(Ghd)UfuGfAf | 3582 | VPusCfsuugCfuCfAfggu | 3671 | CAAACCAGUUGAC | 317 |
| | Cfcugagcaasgsa | | cAfaCfugguususg | | CUGAGCAAGG | |
| AD-1566634 | asgsgca(Ahd)CfaUfCf | 3583 | VPusGfsuuuAfuGfAfugg | 3672 | UUAGGCAACAUCC | 340 |
| | Cfaucauaaascsa | | aUfgUfugccusasa | | AUCAUAAACC | |
| AD-1566635 | gsgscaa(Chd)AfuCfCf | 3584 | VPusGfsguuUfaUfGfaug | 3673 | UAGGCAACAUCCA | 330 |
| | Afucauaaacscsa | | gAfuGfuugccsusa | | UCAUAAACCA | |
| AD-1566638 | asascau(Chd)CfaUfCf | 3585 | VPusCfscugGfuUfUfaug | 3674 | GCAACAUCCAUCA | 1911 |
| | Afuaaaccagsgsa | | aUfgGfauguusgsc | | UAAACCAGGA | |
| AD-1566639 | ascsauc(Chd)AfuCfAf | 3586 | VPusUfsccuGfgUfUfuau | 3675 | CAACAUCCAUCAU | 2854 |
| | Ufaaaccaggsasa | | gAfuGfgaugususg | | AAACCAGGAG | |
| AD-1566641 | asuscca(Uhd)CfaUfAf | 3587 | VPusCfscucCfuGfGfuuu | 3676 | ACAUCCAUCAUAA | 2856 |
| | Afaccaggagsgsa | | aUfgAfuggausgsu | | ACCAGGAGGU | |
| AD-1566642 | uscscau(Chd)AfuAfAf | 3588 | VPusAfsccuCfcUfGfguu | 3677 | CAUCCAUCAUAAA | 2857 |
| | Afccaggaggsusa | | uAfuGfauggasusg | | CCAGGAGGUG | |
| AD-1566643 | cscsauc(Ahd)UfaAfAf | 3589 | VPusCfsaccUfcCfUfggu | 3678 | AUCCAUCAUAAAC | 2858 |
| | Cfcaggaggusgsa | | uUfaUfgauggsasu | | CAGGAGGUGG | |
| AD-1566679 | asuscug(Ahd)GfaAfGf | 3590 | VPusUfsgaaGfuCfAfagc | 3679 | AAAUCUGAGAAGC | 1912 |
| | Cfuugacuucsasa | | uUfcUfcagaususu | | UUGACUUCAA | |
| AD-1566861 | csasgca(Uhd)CfgAfCf | 3591 | VPusAfsgucUfaCfCfaug | 3680 | GGCAGCAUCGACA | 1913 |
| | Afugguagacsusa | | uCfgAfugcugscsc | | UGGUAGACUC | |
| AD-1567153 | usgsgca(Ghd)CfaAfCf | 3592 | VPusCfsaaaUfcCfUfuug | 3681 | AGUGGCAGCAACA | 1914 |
| | Afaaggauuusgsa | | uUfgCfugccascsu | | AAGGAUUUGA | |
| AD-1567154 | gsgscag(Chd)AfaCfAf | 3593 | VPusUfscaaAfuCfCfuuu | 3682 | GUGGCAGCAACAA | 1915 |
| | Afaggauuugsasa | | gUfuGfcugccsasc | | AGGAUUUGAA | |
| AD-1567157 | asgscaa(Chd)AfaAfGf | 3594 | VPusGfsuuuCfaAfAfucc | 3683 | GCAGCAACAAAGG | 1916 |
| | Gfauuugaaascsa | | uUfuGfuugcusgsc | | AUUUGAAACU | |
| AD-1567159 | csasaca(Ahd)AfgGfAf | 3595 | VPusAfsaguUfuCfAfaau | 3684 | AGCAACAAAGGAU | 748 |
| | Ufuugaaacususa | | cCfuUfuguugscsu | | UUGAAACUUG | |
| AD-1567160 | asascaa(Ahd)GfgAfUf | 3596 | VPusCfsaagUfuUfCfaaa | 3685 | GCAACAAAGGAUU | 1918 |
| | Ufugaaacuusgsa | | uCfcUfuuguusgsc | | UGAAACUUGG | |
| AD-1567161 | ascsaaa(Ghd)GfaUfUf | 3597 | VPusCfscaaGfuUfUfcaa | 3686 | CAACAAAGGAUUU | 1919 |
| | Ufgaaacuugsgsa | | aUfcCfuuugususg | | GAAACUUGGU | |
| AD-1567164 | asasgga(Uhd)UfuGfAf | 3598 | VPusAfscacCfaAfGfuuu | 3687 | CAAAGGAUUUGAA | 1922 |
| | Afacuuggugsusa | | cAfaAfuccuususg | | ACUUGGUGUG | |
| AD-1567167 | gsasuuu(Ghd)AfaAfCf | 3599 | VPusAfsacaCfaCfCfaagu | 3688 | AGGAUUUGAAACU | 1923 |
| | Ufuggugugususa | | UfuCfaaaucscsu | | UGGUGUGUUC | |
| AD-1567199 | gsgscag(Ahd)CfgAfUf | 3600 | VPusCfsaagGfuUfGfaca | 3689 | CAGGCAGACGAUG | 1924 |
| | Gfucaaccuusgsa | | uCfgUfcugccsusg | | UCAACCUUGU | |
| AD-1567202 | asgsacg(Ahd)UfgUfCf | 3601 | VPusAfscacAfaGfGfuug | 3690 | GCAGACGAUGUCA | 1925 |
| | Afaccuugugsusa | | aCfaUfcgucusgsc | | ACCUUGUGUG | |
| AD-1567550 | gsgscua(Ahd)CfcAfGf | 3602 | VPusAfscaaAfgAfGfaac | 3691 | AGGGCUAACCAGU | 1932 |
| | Ufucucuuugsusa | | uGfgUfuagccscsu | | UCUCUUUGUA | |
| AD-1567554 | asascca(Ghd)UfuCfUf | 3603 | VPusCfscuuAfcAfAfaga | 3692 | CUAACCAGUUCUC | 1933 |
| | Cfuuuguaagsgsa | | gAfaCfugguusasg | | UUUGUAAGGA | |
| AD-1567784 | uscsuca(Ghd)UfuCfCf | 3604 | VPusUfsuggAfuGfAfgug | 3693 | ACUCUCAGUUCCA | 1948 |
| | Afcucauccasasa | | gAfaCfugagasgsu | | CUCAUCCAAC | |
| AD-1567896 | usasggu(Ghd)UfuUfCf | 3605 | VPusCfsaacAfaGfGfcag | 3694 | CCUAGGUGUUUCU | 1949 |
| | Ufgccuuguusgsa | | aAfaCfaccuasgsg | | GCCUUGUUGA | |
| AD-1567897 | asgsgug(Uhd)UfuCfUf | 3606 | VPusUfscaaCfaAfGfgca | 3695 | CUAGGUGUUUCUG | 1950 |
| | Gfccuuguugsasa | | gAfaAfcaccusasg | | CCUUGUUGAC | |
| AD-1568105 | asgscag(Chd)UfgAfAf | 3607 | VPusUfsaugUfaUfAfugu | 3696 | GGAGCAGCUGAAC | 1954 |
| | Cfauauacausasa | | uCfaGfcugcuscsc | | AUAUACAUAG | |
| AD-1568108 | asgscug(Ahd)AfcAfUf | 3608 | VPusAfsucuAfuGfUfaua | 3697 | GCAGCUGAACAUA | 1955 |
| | Afuacauagasusa | | uGfuUfcagcusgsc | | UACAUAGAUG | |
| AD-1568109 | gscsuga(Ahd)CfaUfAf | 3609 | VPusCfsaucUfaUfGfuau | 3698 | CAGCUGAACAUAU | 1956 |
| | Ufacauagausgsa | | aUfgUfucagcsusg | | ACAUAGAUGU | |
| AD-1568139 | gsasguu(Ghd)UfaGfUf | 3610 | VPusGfsacaAfaUfCfcaac | 3699 | UUGAGUUGUAGUU | 1961 |
| | Ufggauuuguscsa | | UfaCfaacucsasa | | GGAUUUGUCU | |
| AD-1568140 | asgsuug(Uhd)AfgUfUf | 3611 | VPusAfsgacAfaAfUfcca | 3700 | UGAGUUGUAGUUG | 1962 |
| | Gfgauuugucsusa | | aCfuAfcaacuscsa | | GAUUUGUCUG | |
| AD-1568143 | usgsuag(Uhd)UfgGfAf | 3612 | VPusAfsacaGfaCfAfaau | 3701 | GUUGUAGUUGGAU | 1965 |
| | Ufuugucugususa | | cCfaAfcuacasasc | | UUGUCUGUUU | |
| AD-1568144 | gsusagu(Uhd)GfgAfUf | 3613 | VPusAfsaacAfgAfCfaaa | 3702 | UUGUAGUUGGAUU | 1966 |
| | Ufugucuguususa | | uCfcAfacuacsasa | | UGUCUGUUUA | |
| AD-1568148 | ususgga(Uhd)UfuGfUf | 3614 | VPusGfscauAfaAfCfaga | 3703 | AGUUGGAUUUGUC | 1968 |
| | Cfuguuuaugscsa | | cAfaAfuccaascsu | | UGUUUAUGCU | |
| AD-1568150 | gsgsauu(Uhd)GfuCfUf | 3615 | VPusAfsagcAfuAfAfaca | 3704 | UUGGAUUUGUCUG | 1969 |
| | Gfuuuaugcususa | | gAfcAfaauccsasa | | UUUAUGCUUG | |
| AD-1568151 | gsasuuu(Ghd)UfcUfGf | 3616 | VPusCfsaagCfaUfAfaaca | 3705 | UGGAUUUGUCUGU | 1970 |
| | Ufuuaugcuusgsa | | GfaCfaaaucscsa | | UUAUGCUUGG | |
| AD-1568152 | asusuug(Uhd)CfuGfUf | 3617 | VPusCfscaaGfcAfUfaaac | 3706 | GGAUUUGUCUGUU | 1971 |
| | Ufuaugcuugsgsa | | AfgAfcaaauscsc | | UAUGCUUGGA | |
| AD-1568153 | ususugu(Chd)UfgUfUf | 3618 | VPusUfsccaAfgCfAfuaa | 3707 | GAUUUGUCUGUUU | 1972 |
| | Ufaugcuuggsasa | | aCfaGfacaaasusc | | AUGCUUGGAU | |
| AD-1568154 | ususguc(Uhd)GfuUfUf | 3619 | VPusAfsuccAfaGfCfaua | 3708 | AUUUGUCUGUUUA | 1973 |
| | Afugcuuggasusa | | aAfcAfgacaasasu | | UGCUUGGAUU | |
| AD-1568158 | csusguu(Uhd)AfuGfCf | 3620 | VPusGfsugaAfuCfCfaag | 3709 | GUCUGUUUAUGCU | 1976 |
| | Ufuggauucascsa | | cAfuAfaacagsasc | | UGGAUUCACC | |
| AD-1568161 | ususuau(Ghd)CfuUfGf | 3621 | VPusCfsuggUfgAfAfucc | 3710 | UGUUUAUGCUUGG | 1977 |
| | Gfauucaccasgsa | | aAfgCfauaaascsa | | AUUCACCAGA | |
| AD-1568172 | asusuca(Chd)CfaGfAf | 3622 | VPusUfscauAfgUfCfacu | 3711 | GGAUUCACCAGAG | 1978 |
| | Gfugacuaugsasa | | cUfgGfugaauscsc | | UGACUAUGAU | |
| AD-1568174 | uscsacc(Ahd)GfaGfUf | 3623 | VPusUfsaucAfuAfGfuca | 3712 | AUUCACCAGAGUG | 1979 |
| | Gfacuaugausasa | | cUfcUfggugasasu | | ACUAUGAUAG | |
| AD-1568175 | csascca(Ghd)AfgUfGf | 3624 | VPusCfsuauCfaUfAfguc | 3713 | UUCACCAGAGUGA | 1980 |
| | Afcuaugauasgsa | | aCfuCfuggugsasa | | CUAUGAUAGU | |
| AD-692908 | ascscag(Ahd)GfuGfAf | 3625 | VPusAfscuaUfcAfUfagu | 3714 | UCACCAGAGUGAC | 1492 |
| | Cfuaugauagsusa | | cAfcUfcuggusgsa | | UAUGAUAGUG | |
| AD-1568176 | cscsaga(Ghd)UfgAfCf | 3626 | VPusCfsacuAfuCfAfuag | 3715 | CACCAGAGUGACU | 1982 |
| | Ufaugauagusgsa | | uCfaCfucuggsusg | | AUGAUAGUGA | |
| AD-1569830 | ascsaug(Ahd)AfaUfCf | 3627 | VPusAfsagcUfaAfGfaug | 3716 | GGACAUGAAAUCA | 2419 |
| | Afucuuagcususa | | aUfuUfcauguscsc | | UCUUAGCUUA | |
| AD-1569832 | asusgaa(Ahd)UfcAfUf | 3628 | VPusCfsuaaGfcUfAfaga | 3717 | ACAUGAAAUCAUC | 2420 |
| | Cfuuagcuuasgsa | | uGfaUfuucausgsu | | UUAGCUUAGC | |
| AD-1569834 | gsasaau(Chd)AfuCfUf | 3629 | VPusAfsgcuAfaGfCfuaa | 3718 | AUGAAAUCAUCUU | 2421 |
| | Ufagcuuagcsusa | | gAfuGfauuucsasu | | AGCUUAGCUU | |
| AD-1569835 | asasauc(Ahd)UfcUfUf | 3630 | VPusAfsagcUfaAfGfcua | 3719 | UGAAAUCAUCUUA | 2422 |
| | Afgcuuagcususa | | aGfaUfgauuuscsa | | GCUUAGCUUU | |
| AD-1569862 | gsusgaa(Uhd)GfuCfUf | 3631 | VPusUfsacaCfu AfUfaua | 3720 | CUGUGAAUGUCUA | 755 |
| | Afuauagugusasa | | gAfcAfuucacsasg | | UAUAGUGUAU | |
| AD-1569872 | asusaua(Ghd)UfgUfAf | 3632 | VPusAfsaacAfcAfCfaau | 3721 | CUAUAUAGUGUAU | 2429 |
| | Ufuguguguususa | | aCfaCfuauausasg | | UGUGUGUUUU | |
| AD-1569890 | csasaau(Ghd)AfuUfUf | 3633 | VPusCfsaguCfaGfUfgua | 3722 | AACAAAUGAUUUA | 2430 |
| | Afcacugacusgsa | | aAfuCfauuugsusu | | CACUGACUGU | |
| AD-1569892 | asasuga(Uhd)UfuAfCf | 3634 | VPusAfsacaGfuCfAfgug | 3723 | CAAAUGAUUUACA | 2431 |
| | Afcugacugususa | | uAfaAfucauususg | | CUGACUGUUG | |

### Example 2. In Vivo Evaluation in Transgenic Mice

[0780] This Example describes methods for the in vivo evaluation of MAPT RNAi agents in transgenic mice expressing human MAPT RNAs.

[0781] The ability of selected dsRNA agents designed and assayed in Example 1 are assessed for their ability to reduce the level of both sense- or antisense-containing foci in mice expressing human MAPT RNAs.

[0782] Briefly, duplexes of interest, identified from the above in vitro studies and shown in Tables 2-7 and 11-12, were evaluated in vivo. In particular, at pre-dose day 14 wild-type, 8 week old female mice (C57BL/6) were transduced by retroorbital administration of 2×10¹⁰ genome copies of AAV that expresses a portion of the human MAPT gene. In particular, mice were administered an AAV encoding a portion of human MAPT gene coding sequence (323-1648) and part of 3′UTR (4473-5811) of NM_016841.4, cloned in it.

[0783] Two weeks later and at day 0, the mice are administered subcutaneously a single dose of one of the dsRNA agents of interest at 3 mg/Kg or PBS control. The administered duplexes are selected from AD-393752, AD-396420, AD-396425, AD-393239, AD-397167, AD-523561, AD-523565, AD-523562, and AD-535094. Two weeks' post-duplex dosing and at day 14, animals were sacrificed, liver samples were collected and snap-frozen in liquid nitrogen. Tissue mRNA was extracted and analyzed by the RT-QPCR method for human MAPT expression.

[0784] Human MAPT mRNA levels were compared to housekeeping gene GAPDH. The values were then normalized to the average of PBS vehicle control group. The data were expressed as percent of baseline value, and presented as mean plus standard deviation. The results, listed in Table 29 and shown in FIG. 1, demonstrate that the exemplary duplex agents tested effectively reduce the level of the human MAPT mRNA in vivo.

TABLE 29

| Group | Average | Std Dev |
|---|---|---|
| PBS | 100 | 19 |
| AD-393758 | 48 | 5 |
| AD-396420 | 30 | 10 |
| AD-396425 | 16 | 4 |
| AD-393239 | 41 | 19 |
| AD-397167 | 11 | 8 |
| AD-523561 | 40 | 10 |
| AD-523565 | 26 | 5 |
| AD-523562 | 67 | 20 |
| AD-535094 | 74 | 33 |

### Example 3. In Vivo Evaluation of MAPT mRNA Supression in Mice

[0785] This Example describes methods for the in vivo evaluation of MAPT RNAi agents in transgenic mice expressing human MAPT RNAs.

[0786] The ability of selected dsRNA agents designed and assayed in Tables 25-26 in Example 1 are assessed for their ability to reduce the level of both sense- or antisense-containing foci in mice expressing human MAPT RNAs.

[0787] Briefly, duplexes of interest, identified from the above in vitro studies and shown in Tables 25-26, were evaluated in vivo. In particular, the first study included 72 wild-type, 6-8 weeks old female mice (C57BL/6) that were transduced by retroorbital administration of 2×10¹⁰ genome copies of AAV that expresses a portion of the human MAPT gene at pre-dose day. The second study included 60 wild-type, 6-8 weeks old female mice (C57BL/6) that were transduced by retroorbital administration of 2×10¹⁰ genome copies of AAV that expresses a portion of the human MAPT gene at pre-dose day. In both the first and second studies, mice were administered an AAV encoding a portion of human MAPT gene coding sequence of NM_005910, cloned in it.

[0788] Two weeks later and at day 0, 48 mice in the first study divided into 16 groups of 3 animals per group, were administered subcutaneously a single dose of one of the dsRNA agents of interest at 3 mg/Kg or PBS control. The administered duplexes are selected from AD-397167.1, AD-523565.1, AD-1397072.3, AD-1397073.3, AD-1397076.3, AD-1397077.3, AD-1397078.3, AD-1397252.2, AD-1397257.2, AD-1397258.2, AD-1397259.2, AD-1397263.2, AD-1397264.2, AD-1397309.2 and AD-64958.114. Similarly, at day 0, 54 mice in the second study divided into 18 groups of 3 animals per group, were administered subcutaneously a single dose of one of the dsRNA agents of interest at 3 mg/Kg or PBS control. The administered duplexes are selected from AD-397167.1, AD-393758.4, AD-1397080.3, AD-1397293.2, AD-1397294.2, AD-1397081.3, AD-1397083.3, AD-1397298.2, AD-1397299.2, AD-1397084.2, AD-1397085.2, AD-1397087.3, AD-1397306.2, AD-1397307.2, AD-1397308.2 and AD-1397088.2. Two weeks' post-duplex dosing and at day 14, animals in both the study were sacrificed, liver samples were collected and snap-frozen in liquid nitrogen. Tissue mRNA was extracted and analyzed by the RT-QPCR method for human MAPT expression.

[0789] Human MAPT mRNA levels were compared to housekeeping gene GAPDH and normalized to the average of levels in the corresponding PBS vehicle control group. The data were expressed as percent of baseline value, and presented as mean plus standard deviation. The results, listed in Tables 29 and 30, respectively and shown in FIGS. 2 and 3, respectively. The results demonstrate that select exemplary duplex agents tested effectively reduce the level of the human MAPT mRNA in vivo.

TABLE 29

| Group | Average | Std Dev |
|---|---|---|
| PBS | 100.0 | 19 |
| AD-397167.1 | 13.0 | 9 |
| AD-523565.1 | 3.9 | 3 |
| AD-1397072.3 | 29.3 | 1 |
| AD-1397073.3 | 82.7 | 36 |
| AD-1397076.3 | 34.8 | 6 |
| AD-1397077.3 | 50.0 | 15 |
| AD-1397078.3 | 53.6 | 35 |
| AD-1397252.2 | 17.0 | 7 |
| AD-1397257.2 | 29.0 | 9 |
| AD-1397258.2 | 23.8 | 9 |
| AD-1397259.2 | 33.7 | 11 |
| AD-1397263.2 | 59.6 | 6 |
| AD-1397264.2 | 45.6 | 16 |
| AD-1397309.2 | 65.9 | 37 |
| AD-64958.114 | 21.2 | 6 |

TABLE 30

| Group | Average | Std Dev |
|---|---|---|
| PBS | 105 | 11 |
| AD-397167.1 | 18 | 5 |
| AD-393758.4 | 38 | 5 |
| AD-1397080.3 | 14 | 4 |
| AD-1397293.2 | 32 | 7 |
| AD-1397294.2 | 57 | 18 |
| AD-1397081.3 | 28 | 12 |
| AD-1397083.3 | 48 | 29 |
| AD-1397298.2 | 50 | 18 |
| AD-1397299.2 | 22 | 5 |
| AD-1397084.2 | 41 | 19 |
| AD-1397085.2 | 20 | 4 |
| AD-1397087.3 | 58 | 24 |
| AD-1397306.2 | 111 | 34 |
| AD-1397307.2 | 40 | 26 |
| AD-1397308.2 | 64 | 11 |
| AD-1397088.2 | 21 | 1 |
| AD-64958.114 | 49 | 20 |

### EQUIVALENTS

[0790] Those skilled in the art will recognize, or be able to ascertain using no more than routine experimentation, many equivalents to the specific embodiments and methods described herein. Such equivalents are intended to be encompassed by the scope of the following claims.

MAPT SEQUENCES

SEQ ID NO: 1
>NM_016841.4 Homo sapiens microtubule associated protein tau (MAPT),
transcript variant 4, mRNA
GGACGGCCGAGCGGCAGGGCGCTCGCGCGCGCCCACTAGTGGCCGGAGGAGAAGGCTCCCGCGGAGGCCG
CGCTGCCCGCCCCCTCCCCTGGGGAGGCTCGCGTTCCCGCTGCTCGCGCCTGCGCCGCCCGCCGGCCTCA
GGAACGCGCCCTCTTCGCCGGCGCGCGCCCTCGCAGTCACCGCCACCCACCAGCTCCGGCACCAACAGCA
GCGCCGCTGCCACCGCCCACCTTCTGCCGCCGCCACCACAGCCACCTTCTCCTCCTCCGCTGTCCTCTCC
CGTCCTCGCCTCTGTCGACTATCAGGTGAACTTTGAACCAGGATGGCTGAGCCCCGCCAGGAGTTCGAAG
TGATGGAAGATCACGCTGGGACGTACGGGTTGGGGGACAGGAAAGATCAGGGGGGCTACACCATGCACCA
AGACCAAGAGGGTGACACGGACGCTGGCCTGAAAGCTGAAGAAGCAGGCATTGGAGACACCCCCAGCCTG
GAAGACGAAGCTGCTGGTCACGTGACCCAAGCTCGCATGGTCAGTAAAAGCAAAGACGGGACTGGAAGCG
ATGACAAAAAAGCCAAGGGGGCTGATGGTAAAACGAAGATCGCCACACCGCGGGGAGCAGCCCCTCCAGG
CCAGAAGGGCCAGGCCAACGCCACCAGGATTCCAGCAAAAACCCCGCCCGCTCCAAAGACACCACCCAGC
TCTGGTGAACCTCCAAAATCAGGGGATCGCAGCGGCTACAGCAGCCCCGGCTCCCCAGGCACTCCCGGCA
GCCGCTCCCGCACCCCGTCCCTTCCAACCCCACCCACCCGGGAGCCCAAGAAGGTGGCAGTGGTCCGTAC
TCCACCCAAGTCGCCGTCTTCCGCCAAGAGCCGCCTGCAGACAGCCCCCGTGCCCATGCCAGACCTGAAG
AATGTCAAGTCCAAGATCGGCTCCACTGAGAACCTGAAGCACCAGCCGGGAGGCGGGAAGGTGCAAATAG
TCTACAAACCAGTTGACCTGAGCAAGGTGACCTCCAAGTGTGGCTCATTAGGCAACATCCATCATAAACC
AGGAGGTGGCCAGGTGGAAGTAAAATCTGAGAAGCTTGACTTCAAGGACAGAGTCCAGTCGAAGATTGGG
TCCCTGGACAATATCACCCACGTCCCTGGCGGAGGAAATAAAAAGATTGAAACCCACAAGCTGACCTTCC
GCGAGAACGCCAAAGCCAAGACAGACCACGGGGCGGAGATCGTGTACAAGTCGCCAGTGGTGTCTGGGGA
CACGTCTCCACGGCATCTCAGCAATGTCTCCTCCACCGGCAGCATCGACATGGTAGACTCGCCCCAGCTC
GCCACGCTAGCTGACGAGGTGTCTGCCTCCCTGGCCAAGCAGGGTTTGTGATCAGGCCCCTGGGGCGGTC
AATAATTGTGGAGAGGAGAGAATGAGAGAGTGTGGAAAAAAAAAGAATAATGACCCGGCCCCCGCCCTCT
GCCCCCAGCTGCTCCTCGCAGTTCGGTTAATTGGTTAATCACTTAACCTGCTTTTGTCACTCGGCTTTGG
CTCGGGACTTCAAAATCAGTGATGGGAGTAAGAGCAAATTTCATCTTTCCAAATTGATGGGTGGGCTAGT
AATAAAATATTTAAAAAAAAACATTCAAAAACATGGCCACATCCAACATTTCCTCAGGCAATTCCTTTTG
ATTCTTTTTTCTTCCCCCTCCATGTAGAAGAGGGAGAAGGAGAGGCTCTGAAAGCTGCTTCTGGGGGATT
TCAAGGGACTGGGGGTGCCAACCACCTCTGGCCCTGTTGTGGGGGTGTCACAGAGGCAGTGGCAGCAACA
AAGGATTTGAAACTTGGTGTGTTCGTGGAGCCACAGGCAGACGATGTCAACCTTGTGTGAGTGTGACGGG
GGTTGGGGTGGGGCGGGAGGCCACGGGGGAGGCCGAGGCAGGGGCTGGGCAGAGGGGAGAGGAAGCACAA
GAAGTGGGAGTGGGAGAGGAAGCCACGTGCTGGAGAGTAGACATCCCCCTCCTTGCCGCTGGGAGAGCCA
AGGCCTATGCCACCTGCAGCGTCTGAGCGGCCGCCTGTCCTTGGTGGCCGGGGGTGGGGGCCTGCTGTGG
GTCAGTGTGCCACCCTCTGCAGGGCAGCCTGTGGGAGAAGGGACAGCGGGTAAAAAGAGAAGGCAAGCTG
GCAGGAGGGTGGCACTTCGTGGATGACCTCCTTAGAAAAGACTGACCTTGATGTCTTGAGAGCGCTGGCC
TCTTCCTCCCTCCCTGCAGGGTAGGGGGCCTGAGTTGAGGGGCTTCCCTCTGCTCCACAGAAACCCTGTT
TTATTGAGTTCTGAAGGTTGGAACTGCTGCCATGATTTTGGCCACTTTGCAGACCTGGGACTTTAGGGCT
AACCAGTTCTCTTTGTAAGGACTTGTGCCTCTTGGGAGACGTCCACCCGTTTCCAAGCCTGGGCCACTGG
CATCTCTGGAGTGTGTGGGGGTCTGGGAGGCAGGTCCCGAGCCCCCTGTCCTTCCCACGGCCACTGCAGT
CACCCCGTCTGCGCCGCTGTGCTGTTGTCTGCCGTGAGAGCCCAATCACTGCCTATACCCCTCATCACAC
GTCACAATGTCCCGAATTCCCAGCCTCACCACCCCTTCTCAGTAATGACCCTGGTTGGTTGCAGGAGGTA
CCTACTCCATACTGAGGGTGAAATTAAGGGAAGGCAAAGTCCAGGCACAAGAGTGGGACCCCAGCCTCTC
ACTCTCAGTTCCACTCATCCAACTGGGACCCTCACCACGAATCTCATGATCTGATTCGGTTCCCTGTCTC
CTCCTCCCGTCACAGATGTGAGCCAGGGCACTGCTCAGCTGTGACCCTAGGTGTTTCTGCCTTGTTGACA
TGGAGAGAGCCCTTTCCCCTGAGAAGGCCTGGCCCCTTCCTGTGCTGAGCCCACAGCAGCAGGCTGGGTG
TCTTGGTTGTCAGTGGTGGCACCAGGATGGAAGGGCAAGGCACCCAGGGCAGGCCCACAGTCCCGCTGTC
CCCCACTTGCACCCTAGCTTGTAGCTGCCAACCTCCCAGACAGCCCAGCCCGCTGCTCAGCTCCACATGC
ATAGTATCAGCCCTCCACACCCGACAAAGGGGAACACACCCCCTTGGAAATGGTTCTTTTCCCCCAGTCC
CAGCTGGAAGCCATGCTGTCTGTTCTGCTGGAGCAGCTGAACATATACATAGATGTTGCCCTGCCCTCCC
CATCTGCACCCTGTTGAGTTGTAGTTGGATTTGTCTGTTTATGCTTGGATTCACCAGAGTGACTATGATA
GTGAAAAGAAAAAAAAAAAAAAAAAAGGACGCATGTATCTTGAAATGCTTGTAAAGAGGTTTCTAACCCA
CCCTCACGAGGTGTCTCTCACCCCCACACTGGGACTCGTGTGGCCTGTGTGGTGCCACCCTGCTGGGGCC
TCCCAAGTTTTGAAAGGCTTTCCTCAGCACCTGGGACCCAACAGAGACCAGCTTCTAGCAGCTAAGGAGG
CCGTTCAGCTGTGACGAAGGCCTGAAGCACAGGATTAGGACTGAAGCGATGATGTCCCCTTCCCTACTTC
CCCTTGGGGCTCCCTGTGTCAGGGCACAGACTAGGTCTTGTGGCTGGTCTGGCTTGCGGCGCGAGGATGG
TTCTCTCTGGTCATAGCCCGAAGTCTCATGGCAGTCCCAAAGGAGGCTTACAACTCCTGCATCACAAGAA
AAAGGAAGCCACTGCCAGCTGGGGGGATCTGCAGCTCCCAGAAGCTCCGTGAGCCTCAGCCACCCCTCAG
ACTGGGTTCCTCTCCAAGCTCGCCCTCTGGAGGGGCAGCGCAGCCTCCCACCAAGGGCCCTGCGACCACA
GCAGGGATTGGGATGAATTGCCTGTCCTGGATCTGCTCTAGAGGCCCAAGCTGCCTGCCTGAGGAAGGAT
GACTTGACAAGTCAGGAGACACTGTTCCCAAAGCCTTGACCAGAGCACCTCAGCCCGCTGACCTTGCACA
AACTCCATCTGCTGCCATGAGAAAAGGGAAGCCGCCTTTGCAAAACATTGCTGCCTAAAGAAACTCAGCA
GCCTCAGGCCCAATTCTGCCACTTCTGGTTTGGGTACAGTTAAAGGCAACCCTGAGGGACTTGGCAGTAG
AAATCCAGGGCCTCCCCTGGGGCTGGCAGCTTCGTGTGCAGCTAGAGCTTTACCTGAAAGGAAGTCTCTG
GGCCCAGAACTCTCCACCAAGAGCCTCCCTGCCGTTCGCTGAGTCCCAGCAATTCTCCTAAGTTGAAGGG
ATCTGAGAAGGAGAAGGAAATGTGGGGTAGATTTGGTGGTGGTTAGAGATATGCCCCCCTCATTACTGCC
AACAGTTTCGGCTGCATTTCTTCACGCACCTCGGTTCCTCTTCCTGAAGTTCTTGTGCCCTGCTCTTCAG
CACCATGGGCCTTCTTATACGGAAGGCTCTGGGATCTCCCCCTTGTGGGGCAGGCTCTTGGGGCCAGCCT
AAGATCATGGTTTAGGGTGATCAGTGCTGGCAGATAAATTGAAAAGGCACGCTGGCTTGTGATCTTAAAT
GAGGACAATCCCCCCAGGGCTGGGCACTCCTCCCCTCCCCTCACTTCTCCCACCTGCAGAGCCAGTGTCC
TTGGGTGGGCTAGATAGGATATACTGTATGCCGGCTCCTTCAAGCTGCTGACTCACTTTATCAATAGTTC
CATTTAAATTGACTTCAGTGGTGAGACTGTATCCTGTTTGCTATTGCTTGTTGTGCTATGGGGGGAGGGG
GGAGGAATGTGTAAGATAGTTAACATGGGCAAAGGGAGATCTTGGGGTGCAGCACTTAAACTGCCTCGTA
ACCCTTTTCATGATTTCAACCACATTTGCTAGAGGGAGGGAGCAGCCACGGAGTTAGAGGCCCTTGGGGT
TTCTCTTTTCCACTGACAGGCTTTCCCAGGCAGCTGGCTAGTTCATTCCCTCCCCAGCCAGGTGCAGGCG
TAGGAATATGGACATCTGGTTGCTTTGGCCTGCTGCCCTCTTTCAGGGGTCCTAAGCCCACAATCATGCC
TCCCTAAGACCTTGGCATCCTTCCCTCTAAGCCGTTGGCACCTCTGTGCCACCTCTCACACTGGCTCCAG
ACACACAGCCTGTGCTTTTGGAGCTGAGATCACTCGCTTCACCCTCCTCATCTTTGTTCTCCAAGTAAAG
CCACGAGGTCGGGGCGAGGGCAGAGGTGATCACCTGCGTGTCCCATCTACAGACCTGCAGCTTCATAAAA
CTTCTGATTTCTCTTCAGCTTTGAAAAGGGTTACCCTGGGCACTGGCCTAGAGCCTCACCTCCTAATAGA
CTTAGCCCCATGAGTTTGCCATGTTGAGCAGGACTATTTCTGGCACTTGCAAGTCCCATGATTTCTTCGG
TAATTCTGAGGGTGGGGGGAGGGACATGAAATCATCTTAGCTTAGCTTTCTGTCTGTGAATGTCTATATA
GTGTATTGTGTGTTTTAACAAATGATTTACACTGACTGTTGCTGTAAAAGTGAATTTGGAAATAAAGTTA
TTACTCTGATTAAA
SEQ ID NO: 2
>Reverse Complement of SEQ ID NO: 1
TTTAATCAGAGTAATAACTTTATTTCCAAATTCACTTTTACAGCAACAGTCAGTGTAAATCATTTGTTAAAACACA
CAATACACTATATAGACATTCACAGACAGAAAGCTAAGCTAAGATGATTTCATGTCCCTCCCCCCACCCTCAGAAT
TACCGAAGAAATCATGGGACTTGCAAGTGCCAGAAATAGTCCTGCTCAACATGGCAAACTCATGGGGCTAAG
TCTATTAGGAGGTGAGGCTCTAGGCCAGTGCCCAGGGTAACCCTTTTCAAAGCTGAAGAGAAATCAGAAG
TTTTATGAAGCTGCAGGTCTGTAGATGGGACACGCAGGTGATCACCTCTGCCCTCGCCCCGACCTCGTGG
CTTTACTTGGAGAACAAAGATGAGGAGGGTGAAGCGAGTGATCTCAGCTCCAAAAGCACAGGCTGTGTGT
CTGGAGCCAGTGTGAGAGGTGGCACAGAGGTGCCAACGGCTTAGAGGGAAGGATGCCAAGGTCTTAGGGA
GGCATGATTGTGGGCTTAGGACCCCTGAAAGAGGGCAGCAGGCCAAAGCAACCAGATGTCCATATTCCTA
CGCCTGCACCTGGCTGGGGAGGGAATGAACTAGCCAGCTGCCTGGGAAAGCCTGTCAGTGGAAAAGAGAA
ACCCCAAGGGCCTCTAACTCCGTGGCTGCTCCCTCCCTCTAGCAAATGTGGTTGAAATCATGAAAAGGGT
TACGAGGCAGTTTAAGTGCTGCACCCCAAGATCTCCCTTTGCCCATGTTAACTATCTTACACATTCCTCC
CCCCTCCCCCCATAGCACAACAAGCAATAGCAAACAGGATACAGTCTCACCACTGAAGTCAATTTAAATG
GAACTATTGATAAAGTGAGTCAGCAGCTTGAAGGAGCCGGCATACAGTATATCCTATCTAGCCCACCCAA
GGACACTGGCTCTGCAGGTGGGAGAAGTGAGGGGAGGGGAGGAGTGCCCAGCCCTGGGGGGATTGTCCTC
ATTTAAGATCACAAGCCAGCGTGCCTTTTCAATTTATCTGCCAGCACTGATCACCCTAAACCATGATCTT
AGGCTGGCCCCAAGAGCCTGCCCCACAAGGGGGAGATCCCAGAGCCTTCCGTATAAGAAGGCCCATGGTG
CTGAAGAGCAGGGCACAAGAACTTCAGGAAGAGGAACCGAGGTGCGTGAAGAAATGCAGCCGAAACTGTT
GGCAGTAATGAGGGGGGCATATCTCTAACCACCACCAAATCTACCCCACATTTCCTTCTCCTTCTCAGAT
CCCTTCAACTTAGGAGAATTGCTGGGACTCAGCGAACGGCAGGGAGGCTCTTGGTGGAGAGTTCTGGGCC
CAGAGACTTCCTTTCAGGTAAAGCTCTAGCTGCACACGAAGCTGCCAGCCCCAGGGGAGGCCCTGGATTT
CTACTGCCAAGTCCCTCAGGGTTGCCTTTAACTGTACCCAAACCAGAAGTGGCAGAATTGGGCCTGAGGC
TGCTGAGTTTCTTTAGGCAGCAATGTTTTGCAAAGGCGGCTTCCCTTTTCTCATGGCAGCAGATGGAGTT
TGTGCAAGGTCAGCGGGCTGAGGTGCTCTGGTCAAGGCTTTGGGAACAGTGTCTCCTGACTTGTCAAGTC
ATCCTTCCTCAGGCAGGCAGCTTGGGCCTCTAGAGCAGATCCAGGACAGGCAATTCATCCCAATCCCTGC
TGTGGTCGCAGGGCCCTTGGTGGGAGGCTGCGCTGCCCCTCCAGAGGGCGAGCTTGGAGAGGAACCCAGT
CTGAGGGGTGGCTGAGGCTCACGGAGCTTCTGGGAGCTGCAGATCCCCCCAGCTGGCAGTGGCTTCCTTT
TTCTTGTGATGCAGGAGTTGTAAGCCTCCTTTGGGACTGCCATGAGACTTCGGGCTATGACCAGAGAGAA
CCATCCTCGCGCCGCAAGCCAGACCAGCCACAAGACCTAGTCTGTGCCCTGACACAGGGAGCCCCAAGGG
GAAGTAGGGAAGGGGACATCATCGCTTCAGTCCTAATCCTGTGCTTCAGGCCTTCGTCACAGCTGAACGG
CCTCCTTAGCTGCTAGAAGCTGGTCTCTGTTGGGTCCCAGGTGCTGAGGAAAGCCTTTCAAAACTTGGGA
GGCCCCAGCAGGGTGGCACCACACAGGCCACACGAGTCCCAGTGTGGGGGTGAGAGACACCTCGTGAGGG
TGGGTTAGAAACCTCTTTACAAGCATTTCAAGATACATGCGTCCTTTTTTTTTTTTTTTTTTCTTTTCAC
TATCATAGTCACTCTGGTGAATCCAAGCATAAACAGACAAATCCAACTACAACTCAACAGGGTGCAGATG
GGGAGGGCAGGGCAACATCTATGTATATGTTCAGCTGCTCCAGCAGAACAGACAGCATGGCTTCCAGCTG
GGACTGGGGGAAAAGAACCATTTCCAAGGGGGTGTGTTCCCCTTTGTCGGGTGTGGAGGGCTGATACTAT
GCATGTGGAGCTGAGCAGCGGGCTGGGCTGTCTGGGAGGTTGGCAGCTACAAGCTAGGGTGCAAGTGGGG
GACAGCGGGACTGTGGGCCTGCCCTGGGTGCCTTGCCCTTCCATCCTGGTGCCACCACTGACAACCAAGA
CACCCAGCCTGCTGCTGTGGGCTCAGCACAGGAAGGGGCCAGGCCTTCTCAGGGGAAAGGGCTCTCTCCA
TGTCAACAAGGCAGAAACACCTAGGGTCACAGCTGAGCAGTGCCCTGGCTCACATCTGTGACGGGAGGAG
GAGACAGGGAACCGAATCAGATCATGAGATTCGTGGTGAGGGTCCCAGTTGGATGAGTGGAACTGAGAGT
GAGAGGCTGGGGTCCCACTCTTGTGCCTGGACTTTGCCTTCCCTTAATTTCACCCTCAGTATGGAGTAGG
TACCTCCTGCAACCAACCAGGGTCATTACTGAGAAGGGGTGGTGAGGCTGGGAATTCGGGACATTGTGAC
GTGTGATGAGGGGTATAGGCAGTGATTGGGCTCTCACGGCAGACAACAGCACAGCGGCGCAGACGGGGTG
ACTGCAGTGGCCGTGGGAAGGACAGGGGGCTCGGGACCTGCCTCCCAGACCCCCACACACTCCAGAGATG
CCAGTGGCCCAGGCTTGGAAACGGGTGGACGTCTCCCAAGAGGCACAAGTCCTTACAAAGAGAACTGGTT
AGCCCTAAAGTCCCAGGTCTGCAAAGTGGCCAAAATCATGGCAGCAGTTCCAACCTTCAGAACTCAATAA
AACAGGGTTTCTGTGGAGCAGAGGGAAGCCCCTCAACTCAGGCCCCCTACCCTGCAGGGAGGGAGGAAGA
GGCCAGCGCTCTCAAGACATCAAGGTCAGTCTTTTCTAAGGAGGTCATCCACGAAGTGCCACCCTCCTGC
CAGCTTGCCTTCTCTTTTTACCCGCTGTCCCTTCTCCCACAGGCTGCCCTGCAGAGGGTGGCACACTGAC
CCACAGCAGGCCCCCACCCCCGGCCACCAAGGACAGGCGGCCGCTCAGACGCTGCAGGTGGCATAGGCCT
TGGCTCTCCCAGCGGCAAGGAGGGGGATGTCTACTCTCCAGCACGTGGCTTCCTCTCCCACTCCCACTTC
TTGTGCTTCCTCTCCCCTCTGCCCAGCCCCTGCCTCGGCCTCCCCCGTGGCCTCCCGCCCCACCCCAACC
CCCGTCACACTCACACAAGGTTGACATCGTCTGCCTGTGGCTCCACGAACACACCAAGTTTCAAATCCTT
TGTTGCTGCCACTGCCTCTGTGACACCCCCACAACAGGGCCAGAGGTGGTTGGCACCCCCAGTCCCTTGA
AATCCCCCAGAAGCAGCTTTCAGAGCCTCTCCTTCTCCCTCTTCTACATGGAGGGGGAAGAAAAAAGAAT
CAAAAGGAATTGCCTGAGGAAATGTTGGATGTGGCCATGTTTTTGAATGTTTTTTTTTAAATATTTTATT
ACTAGCCCACCCATCAATTTGGAAAGATGAAATTTGCTCTTACTCCCATCACTGATTTTGAAGTCCCGAG
CCAAAGCCGAGTGACAAAAGCAGGTTAAGTGATTAACCAATTAACCGAACTGCGAGGAGCAGCTGGGGGC
AGAGGGCGGGGGCCGGGTCATTATTCTTTTTTTTTCCACACTCTCTCATTCTCTCCTCTCCACAATTATT
GACCGCCCCAGGGGCCTGATCACAAACCCTGCTTGGCCAGGGAGGCAGACACCTCGTCAGCTAGCGTGGC
GAGCTGGGGCGAGTCTACCATGTCGATGCTGCCGGTGGAGGAGACATTGCTGAGATGCCGTGGAGACGTG
TCCCCAGACACCACTGGCGACTTGTACACGATCTCCGCCCCGTGGTCTGTCTTGGCTTTGGCGTTCTCGC
GGAAGGTCAGCTTGTGGGTTTCAATCTTTTTATTTCCTCCGCCAGGGACGTGGGTGATATTGTCCAGGGA
CCCAATCTTCGACTGGACTCTGTCCTTGAAGTCAAGCTTCTCAGATTTTACTTCCACCTGGCCACCTCCT
GGTTTATGATGGATGTTGCCTAATGAGCCACACTTGGAGGTCACCTTGCTCAGGTCAACTGGTTTGTAGA
CTATTTGCACCTTCCCGCCTCCCGGCTGGTGCTTCAGGTTCTCAGTGGAGCCGATCTTGGACTTGACATT
CTTCAGGTCTGGCATGGGCACGGGGGCTGTCTGCAGGCGGCTCTTGGCGGAAGACGGCGACTTGGGTGGA
GTACGGACCACTGCCACCTTCTTGGGCTCCCGGGTGGGTGGGGTTGGAAGGGACGGGGTGCGGGAGCGGC
TGCCGGGAGTGCCTGGGGAGCCGGGGCTGCTGTAGCCGCTGCGATCCCCTGATTTTGGAGGTTCACCAGA
GCTGGGTGGTGTCTTTGGAGCGGGCGGGGTTTTTGCTGGAATCCTGGTGGCGTTGGCCTGGCCCTTCTGG
CCTGGAGGGGCTGCTCCCCGCGGTGTGGCGATCTTCGTTTTACCATCAGCCCCCTTGGCTTTTTTGTCAT
CGCTTCCAGTCCCGTCTTTGCTTTTACTGACCATGCGAGCTTGGGTCACGTGACCAGCAGCTTCGTCTTC
CAGGCTGGGGGTGTCTCCAATGCCTGCTTCTTCAGCTTTCAGGCCAGCGTCCGTGTCACCCTCTTGGTCT
TGGTGCATGGTGTAGCCCCCCTGATCTTTCCTGTCCCCCAACCCGTACGTCCCAGCGTGATCTTCCATCA
CTTCGAACTCCTGGCGGGGCTCAGCCATCCTGGTTCAAAGTTCACCTGATAGTCGACAGAGGCGAGGACG
GGAGAGGACAGCGGAGGAGGAGAAGGTGGCTGTGGTGGCGGCGGCAGAAGGTGGGCGGTGGCAGCGGCGC
TGCTGTTGGTGCCGGAGCTGGTGGGTGGCGGTGACTGCGAGGGCGCGCGCCGGCGAAGAGGGCGCGTTCC
TGAGGCCGGCGGGCGGCGCAGGCGCGAGCAGCGGGAACGCGAGCCTCCCCAGGGGAGGGGGCGGGCAGCG
CGGCCTCCGCGGGAGCCTTCTCCTCCGGCCACTAGTGGGCGCGCGCGAGCGCCCTGCCGCTCGGCCGTCC
SEQ ID NO: 3
>NM_005910.6 Homo sapiens microtubule associated protein tau (MAPT),
transcript variant 2, mRNA
GGACGGCCGAGCGGCAGGGCGCTCGCGCGCGCCCACTAGTGGCCGGAGGAGAAGGCTCCCGCGGAGGCCG
CGCTGCCCGCCCCCTCCCCTGGGGAGGCTCGCGTTCCCGCTGCTCGCGCCTGCGCCGCCCGCCGGCCTCA
GGAACGCGCCCTCTTCGCCGGCGCGCGCCCTCGCAGTCACCGCCACCCACCAGCTCCGGCACCAACAGCA
GCGCCGCTGCCACCGCCCACCTTCTGCCGCCGCCACCACAGCCACCTTCTCCTCCTCCGCTGTCCTCTCC
CGTCCTCGCCTCTGTCGACTATCAGGTGAACTTTGAACCAGGATGGCTGAGCCCCGCCAGGAGTTCGAAG
TGATGGAAGATCACGCTGGGACGTACGGGTTGGGGGACAGGAAAGATCAGGGGGGCTACACCATGCACCA
AGACCAAGAGGGTGACACGGACGCTGGCCTGAAAGAATCTCCCCTGCAGACCCCCACTGAGGACGGATCT
GAGGAACCGGGCTCTGAAACCTCTGATGCTAAGAGCACTCCAACAGCGGAAGATGTGACAGCACCCTTAG
TGGATGAGGGAGCTCCCGGCAAGCAGGCTGCCGCGCAGCCCCACACGGAGATCCCAGAAGGAACCACAGC
TGAAGAAGCAGGCATTGGAGACACCCCCAGCCTGGAAGACGAAGCTGCTGGTCACGTGACCCAAGCTCGC
ATGGTCAGTAAAAGCAAAGACGGGACTGGAAGCGATGACAAAAAAGCCAAGGGGGCTGATGGTAAAACGA
AGATCGCCACACCGCGGGGAGCAGCCCCTCCAGGCCAGAAGGGCCAGGCCAACGCCACCAGGATTCCAGC
AAAAACCCCGCCCGCTCCAAAGACACCACCCAGCTCTGGTGAACCTCCAAAATCAGGGGATCGCAGCGGC
TACAGCAGCCCCGGCTCCCCAGGCACTCCCGGCAGCCGCTCCCGCACCCCGTCCCTTCCAACCCCACCCA
CCCGGGAGCCCAAGAAGGTGGCAGTGGTCCGTACTCCACCCAAGTCGCCGTCTTCCGCCAAGAGCCGCCT
GCAGACAGCCCCCGTGCCCATGCCAGACCTGAAGAATGTCAAGTCCAAGATCGGCTCCACTGAGAACCTG
AAGCACCAGCCGGGAGGCGGGAAGGTGCAGATAATTAATAAGAAGCTGGATCTTAGCAACGTCCAGTCCA
AGTGTGGCTCAAAGGATAATATCAAACACGTCCCGGGAGGCGGCAGTGTGCAAATAGTCTACAAACCAGT
TGACCTGAGCAAGGTGACCTCCAAGTGTGGCTCATTAGGCAACATCCATCATAAACCAGGAGGTGGCCAG
GTGGAAGTAAAATCTGAGAAGCTTGACTTCAAGGACAGAGTCCAGTCGAAGATTGGGTCCCTGGACAATA
TCACCCACGTCCCTGGCGGAGGAAATAAAAAGATTGAAACCCACAAGCTGACCTTCCGCGAGAACGCCAA
AGCCAAGACAGACCACGGGGCGGAGATCGTGTACAAGTCGCCAGTGGTGTCTGGGGACACGTCTCCACGG
CATCTCAGCAATGTCTCCTCCACCGGCAGCATCGACATGGTAGACTCGCCCCAGCTCGCCACGCTAGCTG
ACGAGGTGTCTGCCTCCCTGGCCAAGCAGGGTTTGTGATCAGGCCCCTGGGGCGGTCAATAATTGTGGAG
AGGAGAGAATGAGAGAGTGTGGAAAAAAAAAGAATAATGACCCGGCCCCCGCCCTCTGCCCCCAGCTGCT
CCTCGCAGTTCGGTTAATTGGTTAATCACTTAACCTGCTTTTGTCACTCGGCTTTGGCTCGGGACTTCAA
AATCAGTGATGGGAGTAAGAGCAAATTTCATCTTTCCAAATTGATGGGTGGGCTAGTAATAAAATATTTA
AAAAAAAACATTCAAAAACATGGCCACATCCAACATTTCCTCAGGCAATTCCTTTTGATTCTTTTTTCTT
CCCCCTCCATGTAGAAGAGGGAGAAGGAGAGGCTCTGAAAGCTGCTTCTGGGGGATTTCAAGGGACTGGG
GGTGCCAACCACCTCTGGCCCTGTTGTGGGGGTGTCACAGAGGCAGTGGCAGCAACAAAGGATTTGAAAC
TTGGTGTGTTCGTGGAGCCACAGGCAGACGATGTCAACCTTGTGTGAGTGTGACGGGGGTTGGGGTGGGG
CGGGAGGCCACGGGGGAGGCCGAGGCAGGGGCTGGGCAGAGGGGAGAGGAAGCACAAGAAGTGGGAGTGG
GAGAGGAAGCCACGTGCTGGAGAGTAGACATCCCCCTCCTTGCCGCTGGGAGAGCCAAGGCCTATGCCAC
CTGCAGCGTCTGAGCGGCCGCCTGTCCTTGGTGGCCGGGGGTGGGGGCCTGCTGTGGGTCAGTGTGCCAC
CCTCTGCAGGGCAGCCTGTGGGAGAAGGGACAGCGGGTAAAAAGAGAAGGCAAGCTGGCAGGAGGGTGGC
ACTTCGTGGATGACCTCCTTAGAAAAGACTGACCTTGATGTCTTGAGAGCGCTGGCCTCTTCCTCCCTCC
CTGCAGGGTAGGGGGCCTGAGTTGAGGGGCTTCCCTCTGCTCCACAGAAACCCTGTTTTATTGAGTTCTG
AAGGTTGGAACTGCTGCCATGATTTTGGCCACTTTGCAGACCTGGGACTTTAGGGCTAACCAGTTCTCTT
TGTAAGGACTTGTGCCTCTTGGGAGACGTCCACCCGTTTCCAAGCCTGGGCCACTGGCATCTCTGGAGTG
TGTGGGGGTCTGGGAGGCAGGTCCCGAGCCCCCTGTCCTTCCCACGGCCACTGCAGTCACCCCGTCTGCG
CCGCTGTGCTGTTGTCTGCCGTGAGAGCCCAATCACTGCCTATACCCCTCATCACACGTCACAATGTCCC
GAATTCCCAGCCTCACCACCCCTTCTCAGTAATGACCCTGGTTGGTTGCAGGAGGTACCTACTCCATACT
GAGGGTGAAATTAAGGGAAGGCAAAGTCCAGGCACAAGAGTGGGACCCCAGCCTCTCACTCTCAGTTCCA
CTCATCCAACTGGGACCCTCACCACGAATCTCATGATCTGATTCGGTTCCCTGTCTCCTCCTCCCGTCAC
AGATGTGAGCCAGGGCACTGCTCAGCTGTGACCCTAGGTGTTTCTGCCTTGTTGACATGGAGAGAGCCCT
TTCCCCTGAGAAGGCCTGGCCCCTTCCTGTGCTGAGCCCACAGCAGCAGGCTGGGTGTCTTGGTTGTCAG
TGGTGGCACCAGGATGGAAGGGCAAGGCACCCAGGGCAGGCCCACAGTCCCGCTGTCCCCCACTTGCACC
CTAGCTTGTAGCTGCCAACCTCCCAGACAGCCCAGCCCGCTGCTCAGCTCCACATGCATAGTATCAGCCC
TCCACACCCGACAAAGGGGAACACACCCCCTTGGAAATGGTTCTTTTCCCCCAGTCCCAGCTGGAAGCCA
TGCTGTCTGTTCTGCTGGAGCAGCTGAACATATACATAGATGTTGCCCTGCCCTCCCCATCTGCACCCTG
TTGAGTTGTAGTTGGATTTGTCTGTTTATGCTTGGATTCACCAGAGTGACTATGATAGTGAAAAGAAAAA
AAAAAAAAAAAAAGGACGCATGTATCTTGAAATGCTTGTAAAGAGGTTTCTAACCCACCCTCACGAGGTG
TCTCTCACCCCCACACTGGGACTCGTGTGGCCTGTGTGGTGCCACCCTGCTGGGGCCTCCCAAGTTTTGA
AAGGCTTTCCTCAGCACCTGGGACCCAACAGAGACCAGCTTCTAGCAGCTAAGGAGGCCGTTCAGCTGTG
ACGAAGGCCTGAAGCACAGGATTAGGACTGAAGCGATGATGTCCCCTTCCCTACTTCCCCTTGGGGCTCC
CTGTGTCAGGGCACAGACTAGGTCTTGTGGCTGGTCTGGCTTGCGGCGCGAGGATGGTTCTCTCTGGTCA
TAGCCCGAAGTCTCATGGCAGTCCCAAAGGAGGCTTACAACTCCTGCATCACAAGAAAAAGGAAGCCACT
GCCAGCTGGGGGGATCTGCAGCTCCCAGAAGCTCCGTGAGCCTCAGCCACCCCTCAGACTGGGTTCCTCT
CCAAGCTCGCCCTCTGGAGGGGCAGCGCAGCCTCCCACCAAGGGCCCTGCGACCACAGCAGGGATTGGGA
TGAATTGCCTGTCCTGGATCTGCTCTAGAGGCCCAAGCTGCCTGCCTGAGGAAGGATGACTTGACAAGTC
AGGAGACACTGTTCCCAAAGCCTTGACCAGAGCACCTCAGCCCGCTGACCTTGCACAAACTCCATCTGCT
GCCATGAGAAAAGGGAAGCCGCCTTTGCAAAACATTGCTGCCTAAAGAAACTCAGCAGCCTCAGGCCCAA
TTCTGCCACTTCTGGTTTGGGTACAGTTAAAGGCAACCCTGAGGGACTTGGCAGTAGAAATCCAGGGCCT
CCCCTGGGGCTGGCAGCTTCGTGTGCAGCTAGAGCTTTACCTGAAAGGAAGTCTCTGGGCCCAGAACTCT
CCACCAAGAGCCTCCCTGCCGTTCGCTGAGTCCCAGCAATTCTCCTAAGTTGAAGGGATCTGAGAAGGAG
AAGGAAATGTGGGGTAGATTTGGTGGTGGTTAGAGATATGCCCCCCTCATTACTGCCAACAGTTTCGGCT
GCATTTCTTCACGCACCTCGGTTCCTCTTCCTGAAGTTCTTGTGCCCTGCTCTTCAGCACCATGGGCCTT
CTTATACGGAAGGCTCTGGGATCTCCCCCTTGTGGGGCAGGCTCTTGGGGCCAGCCTAAGATCATGGTTT
AGGGTGATCAGTGCTGGCAGATAAATTGAAAAGGCACGCTGGCTTGTGATCTTAAATGAGGACAATCCCC
CCAGGGCTGGGCACTCCTCCCCTCCCCTCACTTCTCCCACCTGCAGAGCCAGTGTCCTTGGGTGGGCTAG
ATAGGATATACTGTATGCCGGCTCCTTCAAGCTGCTGACTCACTTTATCAATAGTTCCATTTAAATTGAC
TTCAGTGGTGAGACTGTATCCTGTTTGCTATTGCTTGTTGTGCTATGGGGGGAGGGGGGAGGAATGTGTA
AGATAGTTAACATGGGCAAAGGGAGATCTTGGGGTGCAGCACTTAAACTGCCTCGTAACCCTTTTCATGA
TTTCAACCACATTTGCTAGAGGGAGGGAGCAGCCACGGAGTTAGAGGCCCTTGGGGTTTCTCTTTTCCAC
TGACAGGCTTTCCCAGGCAGCTGGCTAGTTCATTCCCTCCCCAGCCAGGTGCAGGCGTAGGAATATGGAC
ATCTGGTTGCTTTGGCCTGCTGCCCTCTTTCAGGGGTCCTAAGCCCACAATCATGCCTCCCTAAGACCTT
GGCATCCTTCCCTCTAAGCCGTTGGCACCTCTGTGCCACCTCTCACACTGGCTCCAGACACACAGCCTGT
GCTTTTGGAGCTGAGATCACTCGCTTCACCCTCCTCATCTTTGTTCTCCAAGTAAAGCCACGAGGTCGGG
GCGAGGGCAGAGGTGATCACCTGCGTGTCCCATCTACAGACCTGCAGCTTCATAAAACTTCTGATTTCTC
TTCAGCTTTGAAAAGGGTTACCCTGGGCACTGGCCTAGAGCCTCACCTCCTAATAGACTTAGCCCCATGA
GTTTGCCATGTTGAGCAGGACTATTTCTGGCACTTGCAAGTCCCATGATTTCTTCGGTAATTCTGAGGGT
GGGGGGAGGGACATGAAATCATCTTAGCTTAGCTTTCTGTCTGTGAATGTCTATATAGTGTATTGTGTGT
TTTAACAAATGATTTACACTGACTGTTGCTGTAAAAGTGAATTTGGAAATAAAGTTATTACTCTGATTAA
A
SEQ ID NO: 4
>Reverse Complement of SEQ ID NO: 3
TTTAATCAGAGTAATAACTTTATTTCCAAATTCACTTTTACAGCACAGTCAGTGTAAATCATTTGTTAAA
ACACACAATACACTATATAGACATTCACAGACAGAAAGCTAAGCTAAGATGATTTCATGTCCCTCCCCCC
ACCCTCAGAATTACCGAAGAAATCATGGGACTTGCAAGTGCCAGAAATAGTCCTGCTCAACATGGCAAAC
TCATGGGGCTAAGTCTATTAGGAGGTGAGGCTCTAGGCCAGTGCCCAGGGTAACCCTTTTCAAAGCTGAA
GAGAAATCAGAAGTTTTATGAAGCTGCAGGTCTGTAGATGGGACACGCAGGTGATCACCTCTGCCCTCGC
CCCGACCTCGTGGCTTTACTTGGAGAACAAAGATGAGGAGGGTGAAGCGAGTGATCTCAGCTCCAAAAGC
ACAGGCTGTGTGTCTGGAGCCAGTGTGAGAGGTGGCACAGAGGTGCCAACGGCTTAGAGGGAAGGATGCC
AAGGTCTTAGGGAGGCATGATTGTGGGCTTAGGACCCCTGAAAGAGGGCAGCAGGCCAAAGCAACCAGAT
GTCCATATTCCTACGCCTGCACCTGGCTGGGGAGGGAATGAACTAGCCAGCTGCCTGGGAAAGCCTGTCA
GTGGAAAAGAGAAACCCCAAGGGCCTCTAACTCCGTGGCTGCTCCCTCCCTCTAGCAAATGTGGTTGAAA
TCATGAAAAGGGTTACGAGGCAGTTTAAGTGCTGCACCCCAAGATCTCCCTTTGCCCATGTTAACTATCT
TACACATTCCTCCCCCCTCCCCCCATAGCACAACAAGCAATAGCAAACAGGATACAGTCTCACCACTGAA
GTCAATTTAAATGGAACTATTGATAAAGTGAGTCAGCAGCTTGAAGGAGCCGGCATACAGTATATCCTAT
CTAGCCCACCCAAGGACACTGGCTCTGCAGGTGGGAGAAGTGAGGGGAGGGGAGGAGTGCCCAGCCCTGG
GGGGATTGTCCTCATTTAAGATCACAAGCCAGCGTGCCTTTTCAATTTATCTGCCAGCACTGATCACCCT
AAACCATGATCTTAGGCTGGCCCCAAGAGCCTGCCCCACAAGGGGGAGATCCCAGAGCCTTCCGTATAAG
AAGGCCCATGGTGCTGAAGAGCAGGGCACAAGAACTTCAGGAAGAGGAACCGAGGTGCGTGAAGAAATGC
AGCCGAAACTGTTGGCAGTAATGAGGGGGGCATATCTCTAACCACCACCAAATCTACCCCACATTTCCTT
CTCCTTCTCAGATCCCTTCAACTTAGGAGAATTGCTGGGACTCAGCGAACGGCAGGGAGGCTCTTGGTGG
AGAGTTCTGGGCCCAGAGACTTCCTTTCAGGTAAAGCTCTAGCTGCACACGAAGCTGCCAGCCCCAGGGG
AGGCCCTGGATTTCTACTGCCAAGTCCCTCAGGGTTGCCTTTAACTGTACCCAAACCAGAAGTGGCAGAA
TTGGGCCTGAGGCTGCTGAGTTTCTTTAGGCAGCAATGTTTTGCAAAGGCGGCTTCCCTTTTCTCATGGC
AGCAGATGGAGTTTGTGCAAGGTCAGCGGGCTGAGGTGCTCTGGTCAAGGCTTTGGGAACAGTGTCTCCT
GACTTGTCAAGTCATCCTTCCTCAGGCAGGCAGCTTGGGCCTCTAGAGCAGATCCAGGACAGGCAATTCA
TCCCAATCCCTGCTGTGGTCGCAGGGCCCTTGGTGGGAGGCTGCGCTGCCCCTCCAGAGGGCGAGCTTGG
AGAGGAACCCAGTCTGAGGGGTGGCTGAGGCTCACGGAGCTTCTGGGAGCTGCAGATCCCCCCAGCTGGC
AGTGGCTTCCTTTTTCTTGTGATGCAGGAGTTGTAAGCCTCCTTTGGGACTGCCATGAGACTTCGGGCTA
TGACCAGAGAGAACCATCCTCGCGCCGCAAGCCAGACCAGCCACAAGACCTAGTCTGTGCCCTGACACAG
GGAGCCCCAAGGGGAAGTAGGGAAGGGGACATCATCGCTTCAGTCCTAATCCTGTGCTTCAGGCCTTCGT
CACAGCTGAACGGCCTCCTTAGCTGCTAGAAGCTGGTCTCTGTTGGGTCCCAGGTGCTGAGGAAAGCCTT
TCAAAACTTGGGAGGCCCCAGCAGGGTGGCACCACACAGGCCACACGAGTCCCAGTGTGGGGGTGAGAGA
CACCTCGTGAGGGTGGGTTAGAAACCTCTTTACAAGCATTTCAAGATACATGCGTCCTTTTTTTTTTTTT
TTTTTCTTTTCACTATCATAGTCACTCTGGTGAATCCAAGCATAAACAGACAAATCCAACTACAACTCAA
CAGGGTGCAGATGGGGAGGGCAGGGCAACATCTATGTATATGTTCAGCTGCTCCAGCAGAACAGACAGCA
TGGCTTCCAGCTGGGACTGGGGGAAAAGAACCATTTCCAAGGGGGTGTGTTCCCCTTTGTCGGGTGTGGA
GGGCTGATACTATGCATGTGGAGCTGAGCAGCGGGCTGGGCTGTCTGGGAGGTTGGCAGCTACAAGCTAG
GGTGCAAGTGGGGGACAGCGGGACTGTGGGCCTGCCCTGGGTGCCTTGCCCTTCCATCCTGGTGCCACCA
CTGACAACCAAGACACCCAGCCTGCTGCTGTGGGCTCAGCACAGGAAGGGGCCAGGCCTTCTCAGGGGAA
AGGGCTCTCTCCATGTCAACAAGGCAGAAACACCTAGGGTCACAGCTGAGCAGTGCCCTGGCTCACATCT
GTGACGGGAGGAGGAGACAGGGAACCGAATCAGATCATGAGATTCGTGGTGAGGGTCCCAGTTGGATGAG
TGGAACTGAGAGTGAGAGGCTGGGGTCCCACTCTTGTGCCTGGACTTTGCCTTCCCTTAATTTCACCCTC
AGTATGGAGTAGGTACCTCCTGCAACCAACCAGGGTCATTACTGAGAAGGGGTGGTGAGGCTGGGAATTC
GGGACATTGTGACGTGTGATGAGGGGTATAGGCAGTGATTGGGCTCTCACGGCAGACAACAGCACAGCGG
CGCAGACGGGGTGACTGCAGTGGCCGTGGGAAGGACAGGGGGCTCGGGACCTGCCTCCCAGACCCCCACA
CACTCCAGAGATGCCAGTGGCCCAGGCTTGGAAACGGGTGGACGTCTCCCAAGAGGCACAAGTCCTTACA
AAGAGAACTGGTTAGCCCTAAAGTCCCAGGTCTGCAAAGTGGCCAAAATCATGGCAGCAGTTCCAACCTT
CAGAACTCAATAAAACAGGGTTTCTGTGGAGCAGAGGGAAGCCCCTCAACTCAGGCCCCCTACCCTGCAG
GGAGGGAGGAAGAGGCCAGCGCTCTCAAGACATCAAGGTCAGTCTTTTCTAAGGAGGTCATCCACGAAGT
GCCACCCTCCTGCCAGCTTGCCTTCTCTTTTTACCCGCTGTCCCTTCTCCCACAGGCTGCCCTGCAGAGG
GTGGCACACTGACCCACAGCAGGCCCCCACCCCCGGCCACCAAGGACAGGCGGCCGCTCAGACGCTGCAG
GTGGCATAGGCCTTGGCTCTCCCAGCGGCAAGGAGGGGGATGTCTACTCTCCAGCACGTGGCTTCCTCTC
CCACTCCCACTTCTTGTGCTTCCTCTCCCCTCTGCCCAGCCCCTGCCTCGGCCTCCCCCGTGGCCTCCCG
CCCCACCCCAACCCCCGTCACACTCACACAAGGTTGACATCGTCTGCCTGTGGCTCCACGAACACACCAA
GTTTCAAATCCTTTGTTGCTGCCACTGCCTCTGTGACACCCCCACAACAGGGCCAGAGGTGGTTGGCACC
CCCAGTCCCTTGAAATCCCCCAGAAGCAGCTTTCAGAGCCTCTCCTTCTCCCTCTTCTACATGGAGGGGG
AAGAAAAAAGAATCAAAAGGAATTGCCTGAGGAAATGTTGGATGTGGCCATGTTTTTGAATGTTTTTTTT
TAAATATTTTATTACTAGCCCACCCATCAATTTGGAAAGATGAAATTTGCTCTTACTCCCATCACTGATT
TTGAAGTCCCGAGCCAAAGCCGAGTGACAAAAGCAGGTTAAGTGATTAACCAATTAACCGAACTGCGAGG
AGCAGCTGGGGGCAGAGGGCGGGGGCCGGGTCATTATTCTTTTTTTTTCCACACTCTCTCATTCTCTCCT
CTCCACAATTATTGACCGCCCCAGGGGCCTGATCACAAACCCTGCTTGGCCAGGGAGGCAGACACCTCGT
CAGCTAGCGTGGCGAGCTGGGGCGAGTCTACCATGTCGATGCTGCCGGTGGAGGAGACATTGCTGAGATG
CCGTGGAGACGTGTCCCCAGACACCACTGGCGACTTGTACACGATCTCCGCCCCGTGGTCTGTCTTGGCT
TTGGCGTTCTCGCGGAAGGTCAGCTTGTGGGTTTCAATCTTTTTATTTCCTCCGCCAGGGACGTGGGTGA
TATTGTCCAGGGACCCAATCTTCGACTGGACTCTGTCCTTGAAGTCAAGCTTCTCAGATTTTACTTCCAC
CTGGCCACCTCCTGGTTTATGATGGATGTTGCCTAATGAGCCACACTTGGAGGTCACCTTGCTCAGGTCA
ACTGGTTTGTAGACTATTTGCACACTGCCGCCTCCCGGGACGTGTTTGATATTATCCTTTGAGCCACACT
TGGACTGGACGTTGCTAAGATCCAGCTTCTTATTAATTATCTGCACCTTCCCGCCTCCCGGCTGGTGCTT
CAGGTTCTCAGTGGAGCCGATCTTGGACTTGACATTCTTCAGGTCTGGCATGGGCACGGGGGCTGTCTGC
AGGCGGCTCTTGGCGGAAGACGGCGACTTGGGTGGAGTACGGACCACTGCCACCTTCTTGGGCTCCCGGG
TGGGTGGGGTTGGAAGGGACGGGGTGCGGGAGCGGCTGCCGGGAGTGCCTGGGGAGCCGGGGCTGCTGTA
GCCGCTGCGATCCCCTGATTTTGGAGGTTCACCAGAGCTGGGTGGTGTCTTTGGAGCGGGCGGGGTTTTT
GCTGGAATCCTGGTGGCGTTGGCCTGGCCCTTCTGGCCTGGAGGGGCTGCTCCCCGCGGTGTGGCGATCT
TCGTTTTACCATCAGCCCCCTTGGCTTTTTTGTCATCGCTTCCAGTCCCGTCTTTGCTTTTACTGACCAT
GCGAGCTTGGGTCACGTGACCAGCAGCTTCGTCTTCCAGGCTGGGGGTGTCTCCAATGCCTGCTTCTTCA
GCTGTGGTTCCTTCTGGGATCTCCGTGTGGGGCTGCGCGGCAGCCTGCTTGCCGGGAGCTCCCTCATCCA
CTAAGGGTGCTGTCACATCTTCCGCTGTTGGAGTGCTCTTAGCATCAGAGGTTTCAGAGCCCGGTTCCTC
AGATCCGTCCTCAGTGGGGGTCTGCAGGGGAGATTCTTTCAGGCCAGCGTCCGTGTCACCCTCTTGGTCT
TGGTGCATGGTGTAGCCCCCCTGATCTTTCCTGTCCCCCAACCCGTACGTCCCAGCGTGATCTTCCATCA
CTTCGAACTCCTGGCGGGGCTCAGCCATCCTGGTTCAAAGTTCACCTGATAGTCGACAGAGGCGAGGACG
GGAGAGGACAGCGGAGGAGGAGAAGGTGGCTGTGGTGGCGGCGGCAGAAGGTGGGCGGTGGCAGCGGCGC
TGCTGTTGGTGCCGGAGCTGGTGGGTGGCGGTGACTGCGAGGGCGCGCGCCGGCGAAGAGGGCGCGTTCC
TGAGGCCGGCGGGCGGCGCAGGCGCGAGCAGCGGGAACGCGAGCCTCCCCAGGGGAGGGGGCGGGCAGCG
CGGCCTCCGCGGGAGCCTTCTCCTCCGGCCACTAGTGGGCGCGCGCGAGCGCCCTGCCGCTCGGCCGTCC
SEQ ID NO: 5
>NM_001038609.2 Mus musculus microtubule-associated protein tau (Mapt),
transcript variant 1, mRNA
CCGCCGGCCTCCAGAACGCGCTTTCTCGGCCGCGCGCGCTCTCAGTCTCCGCCACCCACCAGCTCCAGCA
CCAGCAGCAGCGCCGCCGCCACCGCCCACCTTCTGCCGCCGCCGCCACAACCACCTTCTCCTCCGCTGTC
CTCTTCTGTCCTCGCCTTCTGTCGATTATCAGGCTTTGAACCAGTATGGCTGACCCTCGCCAGGAGTTTG
ACACAATGGAAGACCATGCTGGAGATTACACTCTGCTCCAAGACCAAGAAGGAGACATGGACCATGGCTT
AAAAGAGTCTCCCCCACAGCCCCCCGCCGATGATGGAGCGGAGGAACCAGGGTCGGAGACCTCCGATGCT
AAGAGCACTCCAACTGCTGAAGACGTGACTGCGCCCCTAGTGGATGAGAGAGCTCCCGACAAGCAGGCCG
CTGCCCAGCCCCACACGGAGATCCCAGAAGGAATTACAGCCGAAGAAGCAGGCATCGGAGACACCCCGAA
CCAGGAGGACCAAGCCGCTGGGCATGTGACTCAAGCTCGTGTGGCCAGCAAAGACAGGACAGGAAATGAC
GAGAAGAAAGCCAAGGGCGCTGATGGCAAAACCGGGGCGAAGATCGCCACACCTCGGGGAGCAGCCTCTC
CGGCCCAGAAGGGCACGTCCAACGCCACCAGGATCCCGGCCAAGACCACGCCCAGCCCTAAGACTCCTCC
AGGGTCAGGTGAACCACCAAAATCCGGAGAACGAAGCGGCTACAGCAGCCCCGGCTCTCCCGGAACGCCT
GGCAGTCGCTCGCGCACCCCATCCCTACCAACACCGCCCACCCGGGAGCCCAAGAAGGTGGCAGTGGTCC
GCACTCCCCCTAAGTCACCATCAGCTAGTAAGAGCCGCCTGCAGACTGCCCCTGTGCCCATGCCAGACCT
AAAGAATGTCAGGTCGAAGATTGGCTCTACTGAGAACCTGAAGCACCAGCCAGGAGGTGGCAAGGTGCAG
ATAATTAATAAGAAGCTGGATCTTAGCAACGTCCAGTCCAAGTGTGGCTCGAAGGATAATATCAAACACG
TCCCGGGTGGAGGCAGTGTGCAAATAGTCTACAAGCCGGTGGACCTGAGCAAAGTGACCTCCAAGTGTGG
CTCGTTAGGGAACATCCATCACAAGCCAGGAGGTGGCCAGGTGGAAGTAAAATCAGAGAAGCTGGACTTC
AAGGACAGAGTCCAGTCGAAGATTGGCTCCTTGGATAATATCACCCACGTCCCTGGAGGAGGGAATAAGA
AGATTGAAACCCACAAGCTGACCTTCAGGGAGAATGCCAAAGCCAAGACAGACCATGGAGCAGAAATTGT
GTATAAGTCACCCGTGGTGTCTGGGGACACATCTCCACGGCACCTCAGCAATGTGTCTTCCACGGGCAGC
ATCGACATGGTGGACTCACCACAGCTTGCCACACTAGCCGATGAAGTGTCTGCTTCCTTGGCCAAGCAGG
GTTTGTGATCAGGCTCCCAGGGCAGTCAATAATCATGGAGAGAAGAGAGAGTGAGAGTGTGGAAAAAAAA
AAAAAAAAAGAATGATCTGGCCCCTTGCCCTCTGCCCTCCCCGCTGCTCCTCATAGACAGGCTGACCTGC
TTGTCACCTAACCTGCTTTTGTGGCTCGGATTTGGCTCGGGACTTCAAAATCAGTGATGGGAAAAGTACA
TTTCATCTTTCCAAATTGATTTGTGGGCTAAAAATAAAACATATTTAAGGGAAAAAAAAACATGTAAAAA
CATGGCCAAAAAATTTCCTTGGGCAATTGCTAATTGATTTCCCCCCCCTGACCCCGCCCTCCCTCTCTGA
GTATTAGAGGGTGAAGAAGGCTCTGGAGGCTGCTTCTGGGGAGTGGCTGAGGGACTAGGGCAGCTAATTG
CCCATAGCCCCATCCTAGGGGCTTCAGGGACAGTGGCAGCAATGAGAGATTTGAGACTTGGTGTGTTCGT
GGGGCCGTAGGCAGGTGCTGTTAACTTGTGTGGGTGTGAGTGGGGACTGAAACAGCGACAGCGAAGGCTG
AGAGATGGATGGGTGGACTGAGTTAGAGGACAGAGGTGAGGAAGGCAGGTTGGGAGAGGGGACACTGGCT
CCTTGCCAAGTAGCTTGGGGAGGACAGGGTGCTGCAGCTGCCTGCAGCAGTCCTAGCTAGCTCAGATGCC
TGCTTGATAAAGCACTGTGGGGGTAACGTGGGTGTGTGTGCCCCTTCTGCAGGGCAGCCTGTGGGAGAAG
GGGTATTGGGCAGAAGGAAGGTAAGCCAGCAGGTGGTACCTTGTAGATTGGTTCTCTTGAAGGCTGCTCT
TGACATCCCAGGGCACTGGCTTCTTCCTCCCTCCCCGCAAGGTGGGAGGTCCTGAGCGAGGTGTTTCCCT
TCGCTCCCACAGGAAAAGCTGCTTTACTGAGTTCTCAAGTTTGGAACTACAGCCATGATTTGGCCACCAT
TACAGACCTGGGACTTTAGGGCTAACCAGATCTTTGTAAGGACTTGTGCCTCTTGGGGGACCTCTGCCTG
TTCTCATGCTTGGCCCTCTGGCACTTCTGTAGTGGGAGGGATGGGGGGTGGTATTCTGGGATGTGGGTCC
CAGGCCTCCCATCCCTCACACAGCCACTGTATCCCCTCTCTCTGTCCTATCATGCCCACGTCTGCCACGA
GAGCTAGTCACTGCCGTCCGTACATCACGTCTCACTGTCCTGAGTGCCATGCCTCTCCCAGCCCCCATCC
CTGGCCCCTGGGTAGATATGGGCAATATCTGCTCTACACTAGGGGTTGGAGTCCAGGGAAGGCAAAGATT
TGGGCCTCAGTCTCTAGTCCTACGTTCCACGAATCCAACCAGTGTGCCTCCCACAAGGAACCTTACGACC
TTGTTTGGTTCACTCCATTACTTCCTATCCTGGATGGGAACTGGTGTGTGCCTGCCTGGGGATGACCTTG
GACCTCTGCCTTTTCTTTTATCTAAGTGGATGCCTCCTAGGCCTGACTCCTTGTGTTGAGCTGGAGGCAG
CCAAGTCAGGTGCCAATGTCTTGGCATCAGTAAGAACAGTCAAGAGTCCCAGGGCAGGGCCACACTTCTC
CCATCTTTCGCTTCCACCCCAGCTTGTGATCGCTAGCCTCCCAGAGCTCAGCTGCCATTAAGTCCCCATG
CACGTAATCAGTCTCCACACCCCAGTTTGGGGAACATACCCCCTTGATTGAAGTGTTTTTTTCCTCCGGT
CCCATGGAAACCATGCTGCCTGCCCTGCTGGAGCAGACGGCCACCTCCATAGATGCAGCCCTTTCTTTCC
CGTCTTCGCCCTGTTACGTTGTAGTTGGATTTGTCTGTTTGTCTGGGTTCACCAGAGTGACTATGATAGT
GAAAAGAAAAGAAAGAAAAAGAAAAAAAAAAAAAAAAAGAAAAAGAAAAAGGAAAAAAAAAAGGACGCAT
GTATCTTGAAATATTTGTCAAAAGGTTCTAGCCCACCACGTGATGGAGAGTCTGGATATCTCCTTCCTGA
CGTGGCTCCAGGCCAGTGCAGTGCTAACCTGCTGGGACATCCCATGTTTTGAAGGGTTTCTTCTGCATCT
GGGACCTCACAGACACTGGATTGTGACATTGGAGGTCTGTGACATTGGAGGTCAATGGCATTGGCCAAGG
CCTGAAGCACAGGACCAGCTAGAGGCAGCAGGCTCCGAGTGCCAGGGAGAGCTTGTGGCTGGCCTGTTTT
GTATGAAGATGGTCCTTTCTGATCACGACTTCAAATCCCACAGTAGCCCTGAAAGACATCTAAGAACTCC
TGCATCACAAGAGAAAAGGACACCAGTACCAGCAGGGAGAGCTGTGACCCTAGAAATTCCATGACGACCC
AGTAGATATCCTTGGGCCCTCTCCAAGCCTGGGCCTTTTCACCATAGAGTTTGGGATGGACTGTCCCACT
GATGAAGGGGACATCTTAGGAGACTCCCTTGGTTTCCAAGCTGTCAGCCCCCTGAACTTGCACGACCTCC
TACAGCTTCAGGGACTAGGCCTTTGAAGATTAGGAACCTCAGGCCCACATCAGCCACTTCTGATGTACAG
TTAAGGACAATGTGGAGACTAGGAGGAAGCAGCCAGCCTTTCCCATTAAAGAACTCTTGAGTGCCCAGGG
CTACCTATTGTGAGCTTCCCCACTGATAAGACTTTAGCTGTCCATAGAAGTGAGTCCGAGGGAGGAAAAG
TGTGGTTTCTTCATCATGGTTACCTGTCGTGGTTCTCTCTCTTACACCCATTTACCCATCCCGCAGTTCC
TGTCCTTGAATGGGGGGTGGGGTGCTCTGCCTATCTCTTGTGGGGTGATCAGCCCAAAAATCATGATTTG
GAGTGATCTGATCAGTGCTGATAGGCAGTTTACAAAGGGATTCTGGCTTGTGACTTCAGTGAGGACAATC
CCCCAGGGCCCTTTCTTTCCATGCCTCTCCAACTCAGAGCCAATGTCTTTGGGTGGGCTAGATAGATAGG
GCATACAATTGGCCTGGTTCCTCCAAGCTCTTAATTCACTTTATCAATAGTTCCATTTAAATTGACTTCA
ATGATAAGAGTGTATCCCATTTGAGATTGCTTGCGTTGTGGGGGAGGGGGAGGAGGAACACATTAAGATA
ATTCACATGGGCAAAGGGAGGTCTTGGAGTGTAGCCGTTAAGCCATCTTGTAACCCCATTCATGATTTTG
ACCACCTGCTAGAGAGAAGAGGTGCCAAGAGACTAGAACTTGGAGGCTTGGCTGTCCCACTAATAGGCTT
TCGCAAGGCAGAGGTAGCCAGCTAGGTCCCTGCCTTCCCAGCCAGGTACAGCTCTCAGGTTTGTGGAGGT
AATCTGTGAACTTCTCTTCCTGCTGCCTTCTTGTGATGTCCAGAGCCCACAGTCAAATACCTCCTAAGAA
CCCTGGCTTCCTTCCCTCTAATCCACTGGCACATGACTATCACCTCTGGATTGACCTCAGATCCATAGCC
TACACACTGCTAGCAGTGGCCAAGATCACTTCCTTTATCTCCATCTGTTCTGTTCTCCAGGAAAGTAAGT
GGGGATGAGGGTGGAGGTGGTAATCAACTGTAGATCTGTGGCTTTATGAGCCTTCAGACTTCTCTCTGGC
TTCTTCTGGAAGGGTTACTATTGGCAGTATTGCAATCTCACCCTCCTGATGAACTGTAGCCTGTGCCGTT
ACTGTGCTGGGCATGATCTCCAGTGCTTGCAAGTCCCATGATTTCTTTGGTGATTTTGAGGGTGGGGGGA
GGGACACAAATCAGCTTAGCTTAGCTTCCTGTCTGTGAATGTCCATATAGTGTATTGTGTTTTAACAAAT
GATCTACACTGACTGTTGCTGTAAAAGTGAATTTGGAAATAAAGTTATTACTCTGAATAAAAAAAAAAAA
AAAAAA
SEQ ID NO: 6
>Reverse Complement of SEQ ID NO: 5
TTTTTTTTTTTTTTTTTTATTCAGAGTAATAACTTTATTTCCAAATTCACTTTTACAGCAACAGTCAGTGTAGATC
ATTTGTTAAAACACAATACACTATATGGACATTCACAGACAGGAAGCTAAGCTAAGCTGATTTGTGTCCC
TCCCCCCACCCTCAAAATCACCAAAGAAATCATGGGACTTGCAAGCACTGGAGATCATGCCCAGCACAGT
AACGGCACAGGCTACAGTTCATCAGGAGGGTGAGATTGCAATACTGCCAATAGTAACCCTTCCAGAAGAA
GCCAGAGAGAAGTCTGAAGGCTCATAAAGCCACAGATCTACAGTTGATTACCACCTCCACCCTCATCCCC
ACTTACTTTCCTGGAGAACAGAACAGATGGAGATAAAGGAAGTGATCTTGGCCACTGCTAGCAGTGTGTA
GGCTATGGATCTGAGGTCAATCCAGAGGTGATAGTCATGTGCCAGTGGATTAGAGGGAAGGAAGCCAGGG
TTCTTAGGAGGTATTTGACTGTGGGCTCTGGACATCACAAGAAGGCAGCAGGAAGAGAAGTTCACAGATT
ACCTCCACAAACCTGAGAGCTGTACCTGGCTGGGAAGGCAGGGACCTAGCTGGCTACCTCTGCCTTGCGA
AAGCCTATTAGTGGGACAGCCAAGCCTCCAAGTTCTAGTCTCTTGGCACCTCTTCTCTCTAGCAGGTGGT
CAAAATCATGAATGGGGTTACAAGATGGCTTAACGGCTACACTCCAAGACCTCCCTTTGCCCATGTGAAT
TATCTTAATGTGTTCCTCCTCCCCCTCCCCCACAACGCAAGCAATCTCAAATGGGATACACTCTTATCAT
TGAAGTCAATTTAAATGGAACTATTGATAAAGTGAATTAAGAGCTTGGAGGAACCAGGCCAATTGTATGC
CCTATCTATCTAGCCCACCCAAAGACATTGGCTCTGAGTTGGAGAGGCATGGAAAGAAAGGGCCCTGGGG
GATTGTCCTCACTGAAGTCACAAGCCAGAATCCCTTTGTAAACTGCCTATCAGCACTGATCAGATCACTC
CAAATCATGATTTTTGGGCTGATCACCCCACAAGAGATAGGCAGAGCACCCCACCCCCCATTCAAGGACA
GGAACTGCGGGATGGGTAAATGGGTGTAAGAGAGAGAACCACGACAGGTAACCATGATGAAGAAACCACA
CTTTTCCTCCCTCGGACTCACTTCTATGGACAGCTAAAGTCTTATCAGTGGGGAAGCTCACAATAGGTAG
CCCTGGGCACTCAAGAGTTCTTTAATGGGAAAGGCTGGCTGCTTCCTCCTAGTCTCCACATTGTCCTTAA
CTGTACATCAGAAGTGGCTGATGTGGGCCTGAGGTTCCTAATCTTCAAAGGCCTAGTCCCTGAAGCTGTA
GGAGGTCGTGCAAGTTCAGGGGGCTGACAGCTTGGAAACCAAGGGAGTCTCCTAAGATGTCCCCTTCATC
AGTGGGACAGTCCATCCCAAACTCTATGGTGAAAAGGCCCAGGCTTGGAGAGGGCCCAAGGATATCTACT
GGGTCGTCATGGAATTTCTAGGGTCACAGCTCTCCCTGCTGGTACTGGTGTCCTTTTCTCTTGTGATGCA
GGAGTTCTTAGATGTCTTTCAGGGCTACTGTGGGATTTGAAGTCGTGATCAGAAAGGACCATCTTCATAC
AAAACAGGCCAGCCACAAGCTCTCCCTGGCACTCGGAGCCTGCTGCCTCTAGCTGGTCCTGTGCTTCAGG
CCTTGGCCAATGCCATTGACCTCCAATGTCACAGACCTCCAATGTCACAATCCAGTGTCTGTGAGGTCCC
AGATGCAGAAGAAACCCTTCAAAACATGGGATGTCCCAGCAGGTTAGCACTGCACTGGCCTGGAGCCACG
TCAGGAAGGAGATATCCAGACTCTCCATCACGTGGTGGGCTAGAACCTTTTGACAAATATTTCAAGATAC
ATGCGTCCTTTTTTTTTTCCTTTTTCTTTTTCTTTTTTTTTTTTTTTTTCTTTTTCTTTCTTTTCTTTTC
ACTATCATAGTCACTCTGGTGAACCCAGACAAACAGACAAATCCAACTACAACGTAACAGGGCGAAGACG
GGAAAGAAAGGGCTGCATCTATGGAGGTGGCCGTCTGCTCCAGCAGGGCAGGCAGCATGGTTTCCATGGG
ACCGGAGGAAAAAAACACTTCAATCAAGGGGGTATGTTCCCCAAACTGGGGTGTGGAGACTGATTACGTG
CATGGGGACTTAATGGCAGCTGAGCTCTGGGAGGCTAGCGATCACAAGCTGGGGTGGAAGCGAAAGATGG
GAGAAGTGTGGCCCTGCCCTGGGACTCTTGACTGTTCTTACTGATGCCAAGACATTGGCACCTGACTTGG
CTGCCTCCAGCTCAACACAAGGAGTCAGGCCTAGGAGGCATCCACTTAGATAAAAGAAAAGGCAGAGGTC
CAAGGTCATCCCCAGGCAGGCACACACCAGTTCCCATCCAGGATAGGAAGTAATGGAGTGAACCAAACAA
GGTCGTAAGGTTCCTTGTGGGAGGCACACTGGTTGGATTCGTGGAACGTAGGACTAGAGACTGAGGCCCA
AATCTTTGCCTTCCCTGGACTCCAACCCCTAGTGTAGAGCAGATATTGCCCATATCTACCCAGGGGCCAG
GGATGGGGGCTGGGAGAGGCATGGCACTCAGGACAGTGAGACGTGATGTACGGACGGCAGTGACTAGCTC
TCGTGGCAGACGTGGGCATGATAGGACAGAGAGAGGGGATACAGTGGCTGTGTGAGGGATGGGAGGCCTG
GGACCCACATCCCAGAATACCACCCCCCATCCCTCCCACTACAGAAGTGCCAGAGGGCCAAGCATGAGAA
CAGGCAGAGGTCCCCCAAGAGGCACAAGTCCTTACAAAGATCTGGTTAGCCCTAAAGTCCCAGGTCTGTA
ATGGTGGCCAAATCATGGCTGTAGTTCCAAACTTGAGAACTCAGTAAAGCAGCTTTTCCTGTGGGAGCGA
AGGGAAACACCTCGCTCAGGACCTCCCACCTTGCGGGGAGGGAGGAAGAAGCCAGTGCCCTGGGATGTCA
AGAGCAGCCTTCAAGAGAACCAATCTACAAGGTACCACCTGCTGGCTTACCTTCCTTCTGCCCAATACCC
CTTCTCCCACAGGCTGCCCTGCAGAAGGGGCACACACACCCACGTTACCCCCACAGTGCTTTATCAAGCA
GGCATCTGAGCTAGCTAGGACTGCTGCAGGCAGCTGCAGCACCCTGTCCTCCCCAAGCTACTTGGCAAGG
AGCCAGTGTCCCCTCTCCCAACCTGCCTTCCTCACCTCTGTCCTCTAACTCAGTCCACCCATCCATCTCT
CAGCCTTCGCTGTCGCTGTTTCAGTCCCCACTCACACCCACACAAGTTAACAGCACCTGCCTACGGCCCC
ACGAACACACCAAGTCTCAAATCTCTCATTGCTGCCACTGTCCCTGAAGCCCCTAGGATGGGGCTATGGG
CAATTAGCTGCCCTAGTCCCTCAGCCACTCCCCAGAAGCAGCCTCCAGAGCCTTCTTCACCCTCTAATAC
TCAGAGAGGGAGGGCGGGGTCAGGGGGGGGAAATCAATTAGCAATTGCCCAAGGAAATTTTTTGGCCATG
TTTTTACATGTTTTTTTTTCCCTTAAATATGTTTTATTTTTAGCCCACAAATCAATTTGGAAAGATGAAA
TGTACTTTTCCCATCACTGATTTTGAAGTCCCGAGCCAAATCCGAGCCACAAAAGCAGGTTAGGTGACAA
GCAGGTCAGCCTGTCTATGAGGAGCAGCGGGGAGGGCAGAGGGCAAGGGGCCAGATCATTCTTTTTTTTT
TTTTTTTTCCACACTCTCACTCTCTCTTCTCTCCATGATTATTGACTGCCCTGGGAGCCTGATCACAAAC
CCTGCTTGGCCAAGGAAGCAGACACTTCATCGGCTAGTGTGGCAAGCTGTGGTGAGTCCACCATGTCGAT
GCTGCCCGTGGAAGACACATTGCTGAGGTGCCGTGGAGATGTGTCCCCAGACACCACGGGTGACTTATAC
ACAATTTCTGCTCCATGGTCTGTCTTGGCTTTGGCATTCTCCCTGAAGGTCAGCTTGTGGGTTTCAATCT
TCTTATTCCCTCCTCCAGGGACGTGGGTGATATTATCCAAGGAGCCAATCTTCGACTGGACTCTGTCCTT
GAAGTCCAGCTTCTCTGATTTTACTTCCACCTGGCCACCTCCTGGCTTGTGATGGATGTTCCCTAACGAG
CCACACTTGGAGGTCACTTTGCTCAGGTCCACCGGCTTGTAGACTATTTGCACACTGCCTCCACCCGGGA
CGTGTTTGATATTATCCTTCGAGCCACACTTGGACTGGACGTTGCTAAGATCCAGCTTCTTATTAATTAT
CTGCACCTTGCCACCTCCTGGCTGGTGCTTCAGGTTCTCAGTAGAGCCAATCTTCGACCTGACATTCTTT
AGGTCTGGCATGGGCACAGGGGCAGTCTGCAGGCGGCTCTTACTAGCTGATGGTGACTTAGGGGGAGTGC
GGACCACTGCCACCTTCTTGGGCTCCCGGGTGGGCGGTGTTGGTAGGGATGGGGTGCGCGAGCGACTGCC
AGGCGTTCCGGGAGAGCCGGGGCTGCTGTAGCCGCTTCGTTCTCCGGATTTTGGTGGTTCACCTGACCCT
GGAGGAGTCTTAGGGCTGGGCGTGGTCTTGGCCGGGATCCTGGTGGCGTTGGACGTGCCCTTCTGGGCCG
GAGAGGCTGCTCCCCGAGGTGTGGCGATCTTCGCCCCGGTTTTGCCATCAGCGCCCTTGGCTTTCTTCTC
GTCATTTCCTGTCCTGTCTTTGCTGGCCACACGAGCTTGAGTCACATGCCCAGCGGCTTGGTCCTCCTGG
TTCGGGGTGTCTCCGATGCCTGCTTCTTCGGCTGTAATTCCTTCTGGGATCTCCGTGTGGGGCTGGGCAG
CGGCCTGCTTGTCGGGAGCTCTCTCATCCACTAGGGGCGCAGTCACGTCTTCAGCAGTTGGAGTGCTCTT
AGCATCGGAGGTCTCCGACCCTGGTTCCTCCGCTCCATCATCGGCGGGGGGCTGTGGGGGAGACTCTTTT
AAGCCATGGTCCATGTCTCCTTCTTGGTCTTGGAGCAGAGTGTAATCTCCAGCATGGTCTTCCATTGTGT
CAAACTCCTGGCGAGGGTCAGCCATACTGGTTCAAAGCCTGATAATCGACAGAAGGCGAGGACAGAAGAG
GACAGCGGAGGAGAAGGTGGTTGTGGCGGCGGCGGCAGAAGGTGGGCGGTGGCGGCGGCGCTGCTGCTGG
TGCTGGAGCTGGTGGGTGGCGGAGACTGAGAGCGCGCGCGGCCGAGAAAGCGCGTTCTGGAGGCCGGCGG
SEQ ID NO: 7
>XM_005584540.1 PREDICTED: Macaca fascicularis microtubule associated
protein tau (MAPT), transcript variant X13, mRNA
GCCGAGCGGCAGGGCGCTCGCGCGCGCCCACTGGTGGCCGGAGGAGAAGGCTCCCGCGGAGGCCGGGCTG
CCCGCCCCCTCCCCTGGGGAGGCTCGCGCTCCCGCTGCTCGCGCCTGCGCCGCCTGCCGGCCTCGGGAAC
GCGCCCTCTTCCCCGGCGCGCGCCCTCGCAGTCACCGCCACCCACCAGCTCCGGCACCAACAGCAGCGCC
GCTGCCACCGCCCACCTTCTGCCGCCGCCACCACAGCCACCTTCTCCTCCTCCGCTGTCCTCTCCCGTCC
TCGCCTCTGTCGACTATCAGGCGAGCCTTGAACCAGGATGGCTGAGCCCCGCCAGGAGTTCGATGTGATG
GAAGATCACGCTGGGACGTACGGGTTGGGGGACAGGAAAGATCAAGAGGGCTACACCATGCTCCAAGACC
AAGAGGGTGACACGGACGCTGGCCTGAAAGAATCTCCCCTGCAGACCCCCGCTGAGGATGGATCTGAGGA
ACTGGGCTCTGAAACCTCTGATGCTAAGAGCACTCCAACGGCGGAAGATGTGACAGCGCCCTTAGTGGAT
GAGAGAGCTCCCGGCGAGCAGGCTGCCGCCCAGCCCCACATGGAGATCCCAGAAGGAACCACAGCTGAGG
AAGCAGGCATCGGAGACACCCCCAGCCTGGAAGACGAAGCTGCTGGTCACGTGACCCAAGCTCGCATGGT
CAGTAAAAGCAAAGACGGGACTGGAAGCGATGACAAAAAAGCCAAGGGGGCTGATGGGAAAACGAAGATC
GCCACACCCCGGGGAGCGGCCCCTCCAGGCCAGAAGGGCCAAGCCAACGCCACCAGGATTCCAGCAAAAA
CCCCGCCCGCCCCAAAGACACCACCCAGCTCTGGTGAACCTCCAAAATCAGGGGATCGCAGTGGCTACAG
CAGCCCCGGCTCCCCGGGCACTCCCGGCAGCCGCTCCCGCACCCCGTCCCTTCCAACCCCTCCAGCCCGG
GAGCCCAAGAAGGTGGCGGTGGTCCGTACTCCACCTAAGTCGCCGTCTTCCGCCAAGAGCCGCCTGCAGA
CAGCCCCCGTGCCCATGCCAGACCTGAAGAACGTCAAGTCCAAGATCGGCTCCACCGAGAACCTGAAGCA
CCAGCCGGGAGGCGGGAAGGTGCAGATAATTAATAAGAAGCTGGATCTTAGCAACGTCCAGTCCAAGTGT
GGCTCAAAGGATAATATCAAACACGTCCCGGGAGGCGGCAGTGTGCAAATAGTCTACAAACCAGTTGACC
TGAGCAAGGTGACCTCCAAGTGTGGCTCATTAGGCAACATCCATCATAAACCAGGAGGTGGCCAGGTGGA
AGTAAAATCTGAGAAGCTGGACTTCAAGGACAGAGTGCAGTCGAAGATCGGGTCCCTGGACAATATCACC
CATGTCCCTGGCGGAGGAAATAAAAAGATTGAAACCCACAAGCTGACCTTCCGCGAGAACGCCAAAGCCA
AGACAGACCACGGGGCGGAAATCGTGTACAAGTCGCCGGTGGTGTCTGGGGACACGTCTCCACGGCACCT
CAGCAATGTCTCCTCCACCGGCAGCATCGACATGGTAGACTCGCCCCAGCTCGCCACGCTAGCCGACGAG
GTGTCTGCCTCCCTGGCCAAGCAGGGTTTGTGATCAGGCCCCCGGGGCGGTCAATAATCGTGGAGAGAAG
AGAGAGTGAGAGTGTGGAAAAAAAAAGAATAATGACCCGGCCCCGCCCTCTGCCCCCAGCTGCTCCTCGC
AGTTCGGTTAATCGGTTCATCACTTAACCGGCTTTTATCGCTCGGCTTTGGCTCGGGACTTCAAAATCAG
TGATGGGAATAAGAGCAAATTGCATCTTTCCAAATTGATCGGTGGGCTAATAATAAAATATTTTTTAAAA
AACATTCAAAAACATGGCCACACCCAACATTTCCTCGGGCAATTCCTTTTGATTCTTTTTTTTTCCCCCT
CCATGTAGAAGAGGGAGAAGGAGAGGCTGTGAAAGCTGCTTCGGGGGGATTTCAAGAGACTGGGGGTGCC
CACCGCCTCTGGCCCTGTCGTGGGGGTGTCACAGAGGCAGCGGCAGCAACAAAGGATTTGAAACTTGGTG
TGTTCGTGGAGCCACAGGCAGACGATGTCAACCTTGTGTGAGTGTGACGGGTGGGGGTGGGGCGGGAGGC
CATGGGGGAGGCCAAGGCAGGGGCTGGGCAGAGGGGAGAGGAAGGACGAGAAGGGGGAGTGGGAGAGGAA
GCCACATGCTGGAGAGGAGATGCCCTCCTCCGCGCCACTGGGAGGGCCAAGGCCTCCGCCACCTGCAGTG
TCTCAGACTGAGCGGCTGCCTGTCCTTGGTGGCCAGGGTCTGCTGCGAGTTGATGTGCCACCCTCTGCAG
GGCAGCCTGTGGGAGAAGGGGCGGCGGGTAAGAAGAGAAGGCAAGCTGGCGGGAGGGTGGCACCCCGTGG
ATGACCTCCTTGGAAAAGACTGACCTTGATGTCGGAGGGCGCTGGCCTCTTCCTCCCTCCCTGCAGGGTA
GGGGGCCTGAGCCGAGGGGCTTCCCTCTGCTCCACAGAAACCCTGTTTTATTGAGTTCTGAAGGTTGGAA
CTGCAGCCATGATTTTGGCCACTTTGCAGACCTGGGACTTTAGGGCTAACCAGTTCTCTTTGTAAGGACT
TGTGCCTCTTGGGAGACGTCCACCCGTTTCCAAGCCTGGGCCACCGGCATCTCTGGAGTGTGCAGGGGTC
TGGGAGGCGGGTCCCGAGCCCCCTGTCCTTCCCACGGCCACTGCAGTCACCCCTGTCTGCCCCACTGTGC
TGTCGTCTGCCATGAGAACCCAGTCACTGCCTATACCCCTCATCACGTCACAATGTCCAAATTCCCAGCC
TCACCACCCCCCTTCTCAGTAAGGACCCTGGTTGGCTGTGGGAGGCACCTACTCCATACTGAGGGTGAAA
TTAAGGGAAGGTAAAGTCCAGGCACAAGAGTGGGACCCCAGCCTCTCACTCTCAGTTCCACTCATCCAAC
TGGGTCCCTCACCACGAATCTCACGACCTGATTCGGTTCCCTGCCTCCTCCTCCCATCACAGATGTGAGC
CAGGGCACTGCTCAGCTGTGACCCTCGGTGTTTCTGCCTTGTTGACATAGAGAGAGCCCTTTCCCCCCGA
GAAGGCCTGGCCCCTTCCTGTGCTGAGCCCGCAGCAGGAGGCTGGGTGTCCTGGTTGTCGGTGACGGCAC
CAGGATGGGCGGGCAAGGCACCCAGGGCAGGCCCACAGTCCCGCTGTCCCCCACTTGCACCCCAGCTTGT
GGCTGCCAGCCTCCCAGACAGCCCAGCCCGCTGCTCAGCTCCACATGCATAGAATCAGCCCTCCACATCC
CAAAAAGGGGAACACACCCCCTTCGAAATGGTTTTCTCCCCGGTCCCAGCTGGAAGCCATGCTGTCTGTT
CTGCTGGAGCAGCTGAACATATACATAGATGTTGCCCTGCCCTCCCCATCTGCACCCTGTTGCGTTGTAG
TTGGATTTGTCTGTTTATGCTTGGATTCACCAGAGTGACTATGATAGTGAAAAGAAAAAAAAAAAAAAAA
AAAGGACGCATGTATCTTGAAATGCTTGTAAAGAGGTTTCTAACCCACCCTCACAAGGTGTCTCTCACCC
CCACGCTGGGACGCGTGTGGCCTGTGTGGCGCCGCCCTGCTGGGGCCTCCCAAGGTTTGAAAGGCTTTCC
TCAGCATCCGGGACCCAACAGAGACCAGATTCTAGCATCTAAGGAGGCCGTTCAGCTGTGAAGAAGGCCT
GAAGCACAGGATTAGGACTGAAGCGATGACATCTCCTTCCCTACTTCCCCTTGGGGCTCTCTGTGTCAGG
GCAGAGAGTAGGTCTTGTGGCTGGTCTGGCTTGCGGCACGAGGATGGTTCTCTCTGGTCACAGCCCGAAG
TCCCACAGCAGTCCTAAAGGAGGCTTACAACTCCTGCATCACAAGAAGAAGGAAGCCAGTGCCAGCTGGG
GGGATCTGCAGCTCCCAGAAGCTCCATGAGCCTCAGCCACCCCGCAGACTGGGTTCCTCGCCAAGCTCGC
CCTCTGGAGGGGCAGCCAGCCTCCCACCAAGGGCCCTGCGACCACAGCAGGGATTGGGATGAATGGCCTA
TCCTGGATCTGCTCCAGAGGCCCGAGCCACCTGCCTGAGGAAGGATAAGTCAGGAGACACCGTTCCCAAA
GCCTTGACCAGAGCACCTCAGCCCACTGACCTTGCACAAACTCCATCTGCTGCCATGAGAAAAGGGAAGC
CGCCTTTGCAAAAAATTGCTGCCTAAAGAAACTCAGCAGCCTCAGGCTCAATTCTGCCGCTTCTGGTTTG
GGTACAGTTAAAGGCAACCCTGAGGGACTTGGCAGTAGAAATCCAGGGCATCCCCTAGGGCTGGCAACTT
CGTGTGCAGCTAGAGCTTTCCCTGCAAGAAGTTTCTGGGCCCAGAACTCTCCACCAGGAAGCTCCCTGCT
GTTCGCTAAGTCCCAGCAATTCTCTAAGTGAAGGGATCTGAGAATGAGGAGGAAATGTGGGGTAGAGATT
TGGTGGTGGTTAGAGACATGCCCCCCTCATTACTGCCAACAGTTTCGGCTGCATTTTTCACGTACCTCGG
TTCCTCTTCCTGAAGTTCTTGTGCCCTGCTCTTCAGCACCGTGGGCCTTATCCGGTAGGCTCTGGGATCT
CCCCCTTGTGGGGCAGGCTCTTGGGGCCAGCCTAAGATCATGGTTTAGGGTGATCAGTGCTGGCAGATAA
ATTGCAAAGGCACGCTGGCTTGTGACCTCAAATGACAATCCCCCCAGGGCTGGGCACTCCTCCCCTCCCC
TCACTTCTCCCACCTGCAGAGCCAGTGTCCGTGGGTGGGCTAGATAGGATATACTGTATGCCGGCTCCTT
CAAGCTGTTGACTCACTTTATCAATAGTTCCATTTAAATTGACTTCAATGGTGAGACTGTATCCTGTTTG
CTATTGCTTATTGTGCTATGGGGGGAGGGGGGAGGAATGTGTAACATAGTTAACATGGGTAAAGGGAGAT
CTTGGGGTGCAGCACTTCAATTGCCTCGTAACCCTTTTCATCATTTCAACCACATTTGCTAAAGGGAGGG
AGCAGCCACGCGGTTAGAGGCCCTTGGGGTTTCTCTTTTCCACTGACAGCCTTTCCCAGGCAGCTGGCCA
GTTCCCCATTCCCTCCCCAGCCAGGTGCAGGCGTAGCAATATGGACATCTGGTTGCTTTGGCCTGCTGCC
CTCTTTCAGGGGTCCTAAGCCCACAATCATGCCTCCCTAAGACCCTGGCATCCTTCCTTTTAAGCCGTTG
GCACCTCTGTGCCACCTCTCACACTGGCTCCAGACACAGCCTGTGCTTCTGGCAGCTGAGATCACTCACT
TCCCCCTCCTCATCTTTGTTGGAGCTCCAAGTCAAGCCACGAGGTCAGGGCGAGGGCAGAGGTGGTCACC
AGCGTGTCCCATCTACAGACCTGTGGCTTCGTAAGACTTCTGATTTCTCTTCAGCTTTGAAAAGGGTTAC
CCTGGGCACTGGCCTAGAGTCTCACCTCCTAATAGACTTACCCCCATGAGTTTGCCATGTTGAGCAGGAC
AATTTCTGGCACTTGCAAGTCCCATGATTTCTTCGGTAATTGTGAGGGTGGGGGGAGGGACATGAAATCA
TCTTAGCTTAGCTTCCTGTCTGTGAATGTCTATATAGTGTATTGTGTGTTTTAACAAATGATTTACACTG
ACTGTTGCCGTAAAAGTGAATTTGGAAATAAAGTTATTACTCTGATTAAA
SEQ ID NO: 8
>Reverse Complement of SEQ ID NO: 7
TTTAATCAGAGTAATAACTTTATTTCCAAATTCACTTTTACGGCAACAGT
CAGTGTAAATCATTTGTTAAAACACACAATACACTATATAGACATTCACAGACAGGAAGCTAAGCTAAGA
TGATTTCATGTCCCTCCCCCCACCCTCACAATTACCGAAGAAATCATGGGACTTGCAAGTGCCAGAAATT
GTCCTGCTCAACATGGCAAACTCATGGGGGTAAGTCTATTAGGAGGTGAGACTCTAGGCCAGTGCCCAGG
GTAACCCTTTTCAAAGCTGAAGAGAAATCAGAAGTCTTACGAAGCCACAGGTCTGTAGATGGGACACGCT
GGTGACCACCTCTGCCCTCGCCCTGACCTCGTGGCTTGACTTGGAGCTCCAACAAAGATGAGGAGGGGGA
AGTGAGTGATCTCAGCTGCCAGAAGCACAGGCTGTGTCTGGAGCCAGTGTGAGAGGTGGCACAGAGGTGC
CAACGGCTTAAAAGGAAGGATGCCAGGGTCTTAGGGAGGCATGATTGTGGGCTTAGGACCCCTGAAAGAG
GGCAGCAGGCCAAAGCAACCAGATGTCCATATTGCTACGCCTGCACCTGGCTGGGGAGGGAATGGGGAAC
TGGCCAGCTGCCTGGGAAAGGCTGTCAGTGGAAAAGAGAAACCCCAAGGGCCTCTAACCGCGTGGCTGCT
CCCTCCCTTTAGCAAATGTGGTTGAAATGATGAAAAGGGTTACGAGGCAATTGAAGTGCTGCACCCCAAG
ATCTCCCTTTACCCATGTTAACTATGTTACACATTCCTCCCCCCTCCCCCCATAGCACAATAAGCAATAG
CAAACAGGATACAGTCTCACCATTGAAGTCAATTTAAATGGAACTATTGATAAAGTGAGTCAACAGCTTG
AAGGAGCCGGCATACAGTATATCCTATCTAGCCCACCCACGGACACTGGCTCTGCAGGTGGGAGAAGTGA
GGGGAGGGGAGGAGTGCCCAGCCCTGGGGGGATTGTCATTTGAGGTCACAAGCCAGCGTGCCTTTGCAAT
TTATCTGCCAGCACTGATCACCCTAAACCATGATCTTAGGCTGGCCCCAAGAGCCTGCCCCACAAGGGGG
AGATCCCAGAGCCTACCGGATAAGGCCCACGGTGCTGAAGAGCAGGGCACAAGAACTTCAGGAAGAGGAA
CCGAGGTACGTGAAAAATGCAGCCGAAACTGTTGGCAGTAATGAGGGGGGCATGTCTCTAACCACCACCA
AATCTCTACCCCACATTTCCTCCTCATTCTCAGATCCCTTCACTTAGAGAATTGCTGGGACTTAGCGAAC
AGCAGGGAGCTTCCTGGTGGAGAGTTCTGGGCCCAGAAACTTCTTGCAGGGAAAGCTCTAGCTGCACACG
AAGTTGCCAGCCCTAGGGGATGCCCTGGATTTCTACTGCCAAGTCCCTCAGGGTTGCCTTTAACTGTACC
CAAACCAGAAGCGGCAGAATTGAGCCTGAGGCTGCTGAGTTTCTTTAGGCAGCAATTTTTTGCAAAGGCG
GCTTCCCTTTTCTCATGGCAGCAGATGGAGTTTGTGCAAGGTCAGTGGGCTGAGGTGCTCTGGTCAAGGC
TTTGGGAACGGTGTCTCCTGACTTATCCTTCCTCAGGCAGGTGGCTCGGGCCTCTGGAGCAGATCCAGGA
TAGGCCATTCATCCCAATCCCTGCTGTGGTCGCAGGGCCCTTGGTGGGAGGCTGGCTGCCCCTCCAGAGG
GCGAGCTTGGCGAGGAACCCAGTCTGCGGGGTGGCTGAGGCTCATGGAGCTTCTGGGAGCTGCAGATCCC
CCCAGCTGGCACTGGCTTCCTTCTTCTTGTGATGCAGGAGTTGTAAGCCTCCTTTAGGACTGCTGTGGGA
CTTCGGGCTGTGACCAGAGAGAACCATCCTCGTGCCGCAAGCCAGACCAGCCACAAGACCTACTCTCTGC
CCTGACACAGAGAGCCCCAAGGGGAAGTAGGGAAGGAGATGTCATCGCTTCAGTCCTAATCCTGTGCTTC
AGGCCTTCTTCACAGCTGAACGGCCTCCTTAGATGCTAGAATCTGGTCTCTGTTGGGTCCCGGATGCTGA
GGAAAGCCTTTCAAACCTTGGGAGGCCCCAGCAGGGCGGCGCCACACAGGCCACACGCGTCCCAGCGTGG
GGGTGAGAGACACCTTGTGAGGGTGGGTTAGAAACCTCTTTACAAGCATTTCAAGATACATGCGTCCTTT
TTTTTTTTTTTTTTTTCTTTTCACTATCATAGTCACTCTGGTGAATCCAAGCATAAACAGACAAATCCAA
CTACAACGCAACAGGGTGCAGATGGGGAGGGCAGGGCAACATCTATGTATATGTTCAGCTGCTCCAGCAG
AACAGACAGCATGGCTTCCAGCTGGGACCGGGGAGAAAACCATTTCGAAGGGGGTGTGTTCCCCTTTTTG
GGATGTGGAGGGCTGATTCTATGCATGTGGAGCTGAGCAGCGGGCTGGGCTGTCTGGGAGGCTGGCAGCC
ACAAGCTGGGGTGCAAGTGGGGGACAGCGGGACTGTGGGCCTGCCCTGGGTGCCTTGCCCGCCCATCCTG
GTGCCGTCACCGACAACCAGGACACCCAGCCTCCTGCTGCGGGCTCAGCACAGGAAGGGGCCAGGCCTTC
TCGGGGGGAAAGGGCTCTCTCTATGTCAACAAGGCAGAAACACCGAGGGTCACAGCTGAGCAGTGCCCTG
GCTCACATCTGTGATGGGAGGAGGAGGCAGGGAACCGAATCAGGTCGTGAGATTCGTGGTGAGGGACCCA
GTTGGATGAGTGGAACTGAGAGTGAGAGGCTGGGGTCCCACTCTTGTGCCTGGACTTTACCTTCCCTTAA
TTTCACCCTCAGTATGGAGTAGGTGCCTCCCACAGCCAACCAGGGTCCTTACTGAGAAGGGGGGTGGTGA
GGCTGGGAATTTGGACATTGTGACGTGATGAGGGGTATAGGCAGTGACTGGGTTCTCATGGCAGACGACA
GCACAGTGGGGCAGACAGGGGTGACTGCAGTGGCCGTGGGAAGGACAGGGGGCTCGGGACCCGCCTCCCA
GACCCCTGCACACTCCAGAGATGCCGGTGGCCCAGGCTTGGAAACGGGTGGACGTCTCCCAAGAGGCACA
AGTCCTTACAAAGAGAACTGGTTAGCCCTAAAGTCCCAGGTCTGCAAAGTGGCCAAAATCATGGCTGCAG
TTCCAACCTTCAGAACTCAATAAAACAGGGTTTCTGTGGAGCAGAGGGAAGCCCCTCGGCTCAGGCCCCC
TACCCTGCAGGGAGGGAGGAAGAGGCCAGCGCCCTCCGACATCAAGGTCAGTCTTTTCCAAGGAGGTCAT
CCACGGGGTGCCACCCTCCCGCCAGCTTGCCTTCTCTTCTTACCCGCCGCCCCTTCTCCCACAGGCTGCC
CTGCAGAGGGTGGCACATCAACTCGCAGCAGACCCTGGCCACCAAGGACAGGCAGCCGCTCAGTCTGAGA
CACTGCAGGTGGCGGAGGCCTTGGCCCTCCCAGTGGCGCGGAGGAGGGCATCTCCTCTCCAGCATGTGGC
TTCCTCTCCCACTCCCCCTTCTCGTCCTTCCTCTCCCCTCTGCCCAGCCCCTGCCTTGGCCTCCCCCATG
GCCTCCCGCCCCACCCCCACCCGTCACACTCACACAAGGTTGACATCGTCTGCCTGTGGCTCCACGAACA
CACCAAGTTTCAAATCCTTTGTTGCTGCCGCTGCCTCTGTGACACCCCCACGACAGGGCCAGAGGCGGTG
GGCACCCCCAGTCTCTTGAAATCCCCCCGAAGCAGCTTTCACAGCCTCTCCTTCTCCCTCTTCTACATGG
AGGGGGAAAAAAAAAGAATCAAAAGGAATTGCCCGAGGAAATGTTGGGTGTGGCCATGTTTTTGAATGTT
TTTTAAAAAATATTTTATTATTAGCCCACCGATCAATTTGGAAAGATGCAATTTGCTCTTATTCCCATCA
CTGATTTTGAAGTCCCGAGCCAAAGCCGAGCGATAAAAGCCGGTTAAGTGATGAACCGATTAACCGAACT
GCGAGGAGCAGCTGGGGGCAGAGGGCGGGGCCGGGTCATTATTCTTTTTTTTTCCACACTCTCACTCTCT
CTTCTCTCCACGATTATTGACCGCCCCGGGGGCCTGATCACAAACCCTGCTTGGCCAGGGAGGCAGACAC
CTCGTCGGCTAGCGTGGCGAGCTGGGGCGAGTCTACCATGTCGATGCTGCCGGTGGAGGAGACATTGCTG
AGGTGCCGTGGAGACGTGTCCCCAGACACCACCGGCGACTTGTACACGATTTCCGCCCCGTGGTCTGTCT
TGGCTTTGGCGTTCTCGCGGAAGGTCAGCTTGTGGGTTTCAATCTTTTTATTTCCTCCGCCAGGGACATG
GGTGATATTGTCCAGGGACCCGATCTTCGACTGCACTCTGTCCTTGAAGTCCAGCTTCTCAGATTTTACT
TCCACCTGGCCACCTCCTGGTTTATGATGGATGTTGCCTAATGAGCCACACTTGGAGGTCACCTTGCTCA
GGTCAACTGGTTTGTAGACTATTTGCACACTGCCGCCTCCCGGGACGTGTTTGATATTATCCTTTGAGCC
ACACTTGGACTGGACGTTGCTAAGATCCAGCTTCTTATTAATTATCTGCACCTTCCCGCCTCCCGGCTGG
TGCTTCAGGTTCTCGGTGGAGCCGATCTTGGACTTGACGTTCTTCAGGTCTGGCATGGGCACGGGGGCTG
TCTGCAGGCGGCTCTTGGCGGAAGACGGCGACTTAGGTGGAGTACGGACCACCGCCACCTTCTTGGGCTC
CCGGGCTGGAGGGGTTGGAAGGGACGGGGTGCGGGAGCGGCTGCCGGGAGTGCCCGGGGAGCCGGGGCTG
CTGTAGCCACTGCGATCCCCTGATTTTGGAGGTTCACCAGAGCTGGGTGGTGTCTTTGGGGCGGGCGGGG
TTTTTGCTGGAATCCTGGTGGCGTTGGCTTGGCCCTTCTGGCCTGGAGGGGCCGCTCCCCGGGGTGTGGC
GATCTTCGTTTTCCCATCAGCCCCCTTGGCTTTTTTGTCATCGCTTCCAGTCCCGTCTTTGCTTTTACTG
ACCATGCGAGCTTGGGTCACGTGACCAGCAGCTTCGTCTTCCAGGCTGGGGGTGTCTCCGATGCCTGCTT
CCTCAGCTGTGGTTCCTTCTGGGATCTCCATGTGGGGCTGGGCGGCAGCCTGCTCGCCGGGAGCTCTCTC
ATCCACTAAGGGCGCTGTCACATCTTCCGCCGTTGGAGTGCTCTTAGCATCAGAGGTTTCAGAGCCCAGT
TCCTCAGATCCATCCTCAGCGGGGGTCTGCAGGGGAGATTCTTTCAGGCCAGCGTCCGTGTCACCCTCTT
GGTCTTGGAGCATGGTGTAGCCCTCTTGATCTTTCCTGTCCCCCAACCCGTACGTCCCAGCGTGATCTTC
CATCACATCGAACTCCTGGCGGGGCTCAGCCATCCTGGTTCAAGGCTCGCCTGATAGTCGACAGAGGCGA
GGACGGGAGAGGACAGCGGAGGAGGAGAAGGTGGCTGTGGTGGCGGCGGCAGAAGGTGGGCGGTGGCAGC
GGCGCTGCTGTTGGTGCCGGAGCTGGTGGGTGGCGGTGACTGCGAGGGCGCGCGCCGGGGAAGAGGGCGC
GTTCCCGAGGCCGGCAGGCGGCGCAGGCGCGAGCAGCGGGAGCGCGAGCCTCCCCAGGGGAGGGGGCGGG
CAGCCCGGCCTCCGCGGGAGCCTTCTCCTCCGGCCACCAGTGGGCGCGCGCGAGCGCCCTGCCGCTCGGC
SEQ ID NO: 9
>XM_008768277.2 PREDICTED: Rattus norvegicus microtubule-associated protein
tau (Mapt), transcript variant X7, mRNA
ACCGCCCACCTTCTGCTGTCGCCGCCGCCACAACCACCTTCCCCTCCGCTGTCCTCTTCTGTCCTCGCCT
CCTGTCGATTATCAGGCTTTGAAGCAGCATGGCTGAACCCCGCCAGGAGTTTGACACAATGGAAGACCAG
GCCGGAGATTACACTATGCTCCAAGACCAAGAAGGAGACATGGACCATGGCTTAAAAGAGTCTCCCCCAC
AGCCCCCAGCCGATGATGGATCAGAAGAACCAGGGTCGGAGACCTCTGATGCTAAGAGCACTCCAACTGC
TGAAGACGTGACTGCGCCCCTAGTGGAAGAGAGAGCTCCCGACAAGCAGGCGACTGCCCAGTCCCACACG
GAGATCCCAGAAGGCACCACAGCTGAAGAAGCAGGCATCGGAGACACCCCGAACATGGAGGACCAAGCTG
CTGGGCATGTGACTCAAGCTCGAGTGGCCGGCGTAAGCAAAGACAGGACAGGAAATGACGAGAAGAAAGC
CAAGGGCGCCGATGGCAAAACGGGGGCGAAGATCGCCACACCTCGGGGAGCAGCCACTCCGGGCCAGAAA
GGCACATCCAATGCCACCAGGATCCCAGCCAAGACCACACCCAGCCCAAAGACTCCTCCAGGATCAGGTG
AACCACCAAAATCCGGAGAACGAAGCGGCTACAGCAGCCCCGGCTCGCCCGGAACCCCTGGCAGTCGCTC
CCGTACCCCATCCCTACCAACGCCGCCCACCCGAGAGCCCAAAAAGGTGGCAGTGGTTCGCACTCCCCCT
AAGTCACCGTCTGCCAGTAAGAGCCGCCTACAGACTGCCCCTGTGCCCATGCCAGACCTAAAGAACGTCA
GGTCCAAGATTGGCTCCACTGAGAACCTGAAGCACCAGCCGGGAGGCGGCAAGGTGCAGATAATTAATAA
GAAGCTGGATCTTAGCAACGTCCAGTCCAAGTGTGGCTCAAAGGACAATATCAAACACGTCCCGGGCGGA
GGCAGTGTGCAAATAGTCTACAAGCCAGTGGACCTGAGCAAGGTGACCTCCAAGTGTGGTTCCTTAGGGA
ACATCCATCACAAGCCAGGAGGTGGCCAGGTAGAAGTAAAATCAGAGAAGCTGGACTTCAAGGATAGAGT
CCAGTCGAAGATTGGCTCCTTGGATAACATCACCCATGTCCCTGGAGGAGGGAATAAGAAGATTGAAACC
CACAAGCTGACCTTCAGGGAGAATGCCAAAGCCAAGACAGACCATGGAGCAGAAATCGTGTACAAGTCAC
CTGTGGTGTCTGGGGACACATCTCCACGGCACCTCAGCAACGTCTCCTCCACGGGCAGCATCGACATGGT
GGACTCTCCACAGCTTGCCACGTTAGCCGATGAAGTGTCCGCCTCTTTGGCCAAGCAGGGTTTGTGATCA
GGCCCCTGGGGCCGTCACTGATCATGGAGAGAAGAGAGAGTGAGAGTGTGGAAAAAAAAAAAAAAAAAAG
AATGACCTGGCCCCTCACCCTCTGCCCTCCCCGCTGCTCCTCATAGACAGGCTGACCAGCTTGTCACCTA
ACCTGCTTTTGTGGCTCGGGTTTGGCTCGGGACTTCAAAATCAGTGATGGGAAAAAGTAAATTTCATCTT
TCCAAATTGATTTGTGGGCTAGTAATAAAATATTTTTAAGGAAGGAAAAAAAAAAAAACACGTAAAACCA
TGGCCAAACAAAACCCAACATTTCCTTGGCAATTGTTATTGACCCCGCCCCCCCCCTCTGAGTTTTAGAG
GGTGAAGGAGGCTTTGGATGGAGGCTGCTTCTGGGGATTGGCTGAGGGACTAGGGCAACTAATTGCCCAC
AGCCCCATCTTAGGGGCATCAGGGACAGCGGCAGCAATGAAAGACTTGGGACTTGGTGTGTTTGTGGAGC
CGTAGGCAGGTGATGTTAACTTTGTGTGGGTTTGAGGGAGGACTGTGATAGTGAAGGCTGAGAGATGGGT
GGGCTGGGAGTCAGAGGAGAGAGGTGAGGAAGACAGGTTGGGAGAGGGGACATTGGCTCCTTGCCAAGGA
GCTTGGGAAGCACAGGTAGCCCTGGCTGCCTGCAGCAGTCTTAGCTAGCACAGATGCCTGCCTGAGAAAG
CACAGTGGGGTACAGTGGGTGTGTGTGCCCCTTCTGAAGGGCAGCCCATGGGAGAAGGGGTATTGGGCAG
AAGGAAGGTAGGCCAGAAGGTGGCACCTTGTAGATTGGTTCTCTGAAGGCTGACCTTGCCATCCCAGGGC
ACTGGCTCCCACCCTCCAGGGAGGGAGGTCCTGAGCTGAGGAGCTTCCCTTTGCTCTCACAGGAAAACCT
GTGTTACTGAGTTCTGAAGTTTGGAACTACAGCCATGATTTTGGCCACCATACAGACCTGGGACTTTAGG
GCTAACCAGTTCTTTGTAAGGACTTGTGCCTCTTGCGGGAACATCTGCCTGTTCTCAAGCCTGGTCCTCT
GGCACTTCTGCAGTGTGAGGGATGGGGGTGGTAATTCTGGGATGTGGGTCCCAGGCCTCCCATCCTCGCA
CAGCCACTGTATCCCCTCTACCTGTCCTATCATGCCCACGTCTGCCATGAGAGCCAGTCACTGCCGTCCG
TACATCACGTCTCACCGTCCTGAGTGCCCAGCCTCCCCAAGCCCCATCCCTGGCCCCTGGGTAGTTATGG
CCAATATCTGCTCTACACTAGGGGTTGGAGTCCAGGGAAGGCAAAGATTTGGGCCTTGGTCTCTAGTCCT
ACGTTGCACGAATCCAACCAGTGTGCCTCCCACAAGGAACCTTACAACCTTGTTTGGTTTGCTCCATCAT
TTCCCATCGTGGATGGGAGTCCGTGTGTGCCTGGAGATTACCCTGGACACCTCTGCTTTTTTTTTTTTAC
TTTAGCGGTTGCCTCCTAGGCCTGACTCCTTCCCATGTTGAACTGGAGGCAGCCACGTTAGGTGTCAATG
TCCTGGCATCAGTATGAACAGTCAGTAGTCCCAGGGCAGGGCCACACTTCTCCCATCTTCTGCTTCCACC
CCAGCTTGTGATTGCTAGCCTCCCAGAGCTCAGCCGCCATTAAGTCCCCATGCACGTAATCAGCCCTTCA
TACCCCAATTTGGGGAACATACCCCTTGATTGAAATGTTTTCCCTCCAGTCCTATGGAAGCGGTGCTGCC
TGCCCTGCTGGAGCAGCCAGCCATCTCCAGAGACGCAGCCCTTTCTCTCCTGTCCGCACCCTGTTGCGCT
GTAGTCGGATTCGTCTGTTTGTCTGGGTTCACCAGAGTGACTATGATAGTGAAAAGAAAAAGAAAAAGAA
AAAAGAAAAAAGAAAAAAAAAAAAGGACGCATGTTATCTTGAAATATTTGTCAAAAGGTTGTAGCCCACC
GCAGGGATTGGAGGGCCTGGATATTCCTTGTCTTCTTCGTGACTTAGGTCCAGGCCGGTGCAGTGCTACC
CTGCTGGGACATCCCATGTTTTGAAGGGTTTCTTCTTCATCTGGGACCCTGCAGACACTGGATTGTGACA
TTGGAGGTCTATGACATTGGCCAAGGCCTGAAGCACAGGACCCGTTAGAGGCAGCAGGCTCCGACTGTCA
GGGAGAGCTTGTGGCTGGCCTGTTTCTCTGAGTGAAGATGGTCCTCTCTAATCACAACTTCAAGTCCCAC
AGCAGCCCTGGCAGACATCTAAGAACTCCTGCATCACAAGAGAAAAGGACACTAGTACCAGCAGGGAGAG
CTGTGGCCCTAGAAATTCCATGACTCTCCACTACATATCCGTGGGTCCTTTCCAAGCCTTGGCCTCGTCA
CCAAGGGCTTGGGATGGACTGCCCCACTGATGAAAGGGACATCTTTGGAGACCCCCTTGGTTTCCAAGGC
GTCAGCCCCCTGACCTTGCATGACCTCCTACAGCTGTAAGGATGAGGCCTTTAAAGATTAGGAACCTCAG
GCCCAGGTCGGCCACTTTGGGCTTGGGTACAGTTAGGGACGATGCGGTAGAAGGAGGTGGCCAACCTTTC
CCATATAAGAGTTCTGTGTGCCCAGAGCTACCCTATTGTGAGCTCCCCACTGCTGATGGACTTTAGCTGT
CCTTAGAAGTGAAGAGTCCAACGGAGGAAAAGGAAGTGTGGTTTGATGGTCTGTGGTCCCTTCATCATGG
TTACCTGTTGTGGTTTTCTCTCGTATACCCATTTACCCATCCTGCAGTTCCTGTCCTTGAATAGGGGTGG
GGGTACTCTGCCATATCTCTTGTAGGGCAGTCAGCCCCCAAGTCATAGTTTGGAGTGATCTGGTCAGTGC
TAATAGGCAGTTTACAAAGGAATTCTGGCTTGTTACTTCAGTGAGGACAATCCCCCAAGGGCCCTGGCAC
CTGTCCTGTCTTTCCATGGCTCTCCACTGCAGAGCCAATGTCTTTGGGTGGGCTAGATAGGGTGTACAAT
TTGCCTGGTTCCTCCAAGCTCTTAATCCACTTTATCAATAGTTCCATTTAAATTGACTTCAATGATAAGA
GTGTATCCCATTTGAGATTGCTTGTGTTGTGGGGTAAAGGGGGGAGGAGGAACATGTTAAGATAATTGAC
ATGGGCAAGGGGAAGTCTTGAAGTGTAGCAGTTAAACCATCTTGTAGCCCCATTCATGATGTTGACCACT
TGCTAGAGAGAAGAGGTGCCATAAGGCTAGAACCTAGAGGCTTGGCTGTCCCACCAACAGGCAGGCTTTT
GCAAGGCAGAGGCAGCCAGCTAGGTCCCTGACTTCCCAGCCAGGTGCAGCTCTAAGAACTGCTCTTGCCT
GCTGCCTTCTTGTGGTGTCCAGAGCCCACAGCCAATGCCTCCTCAAAACCCTGGCTTCCTTCCTTCTAAT
CCACTGGCACATCAGCATCACCTCCGGATTGACTTCAGATCCACAGCCTACACTACTAGCAGTGGGTAAG
ACCACTTCCTTTGTCCTTGTCTGTTCTCCAGAAAAGTGGGCATGGAGGCGGTGTTAATAACTATAGGTCT
GTGGCTTTATGAGCCTTCAAACTTCTCTCTAGCTTCTGAAAGGGTTACTTTTGGGCAGTATTGCAGTCTC
ACCCTCCCGATGGGCTGTAGCCTGTGCAGTTGCTGTACTGGGCATGATCTCCAGTGCTTGCAAGTCCCAT
GATTTCTTTGGTGATTTTGAGGGTGGGGGGAGGGACATGAATCATCTTAGCTTAGCTTCCTGTCTGTGAA
TGTCCATATAGTGTACTGTGTTTTAACAAACGATTTACACTGACTGTTGCTGTACAAGTGAATTTGGAAA
TAAAGTTATTACTCTGATTAAA
SEQ ID NO: 10
>Reverse Complement of SEQ ID NO: 9
TTTAATCAGAGTAATAACTTTA
TTTCCAAATTCACTTGTACAGCAACAGTCAGTGTAAATCGTTTGTTAAAACACAGTACACTATATGGACA
TTCACAGACAGGAAGCTAAGCTAAGATGATTCATGTCCCTCCCCCCACCCTCAAAATCACCAAAGAAATC
ATGGGACTTGCAAGCACTGGAGATCATGCCCAGTACAGCAACTGCACAGGCTACAGCCCATCGGGAGGGT
GAGACTGCAATACTGCCCAAAAGTAACCCTTTCAGAAGCTAGAGAGAAGTTTGAAGGCTCATAAAGCCAC
AGACCTATAGTTATTAACACCGCCTCCATGCCCACTTTTCTGGAGAACAGACAAGGACAAAGGAAGTGGT
CTTACCCACTGCTAGTAGTGTAGGCTGTGGATCTGAAGTCAATCCGGAGGTGATGCTGATGTGCCAGTGG
ATTAGAAGGAAGGAAGCCAGGGTTTTGAGGAGGCATTGGCTGTGGGCTCTGGACACCACAAGAAGGCAGC
AGGCAAGAGCAGTTCTTAGAGCTGCACCTGGCTGGGAAGTCAGGGACCTAGCTGGCTGCCTCTGCCTTGC
AAAAGCCTGCCTGTTGGTGGGACAGCCAAGCCTCTAGGTTCTAGCCTTATGGCACCTCTTCTCTCTAGCA
AGTGGTCAACATCATGAATGGGGCTACAAGATGGTTTAACTGCTACACTTCAAGACTTCCCCTTGCCCAT
GTCAATTATCTTAACATGTTCCTCCTCCCCCCTTTACCCCACAACACAAGCAATCTCAAATGGGATACAC
TCTTATCATTGAAGTCAATTTAAATGGAACTATTGATAAAGTGGATTAAGAGCTTGGAGGAACCAGGCAA
ATTGTACACCCTATCTAGCCCACCCAAAGACATTGGCTCTGCAGTGGAGAGCCATGGAAAGACAGGACAG
GTGCCAGGGCCCTTGGGGGATTGTCCTCACTGAAGTAACAAGCCAGAATTCCTTTGTAAACTGCCTATTA
GCACTGACCAGATCACTCCAAACTATGACTTGGGGGCTGACTGCCCTACAAGAGATATGGCAGAGTACCC
CCACCCCTATTCAAGGACAGGAACTGCAGGATGGGTAAATGGGTATACGAGAGAAAACCACAACAGGTAA
CCATGATGAAGGGACCACAGACCATCAAACCACACTTCCTTTTCCTCCGTTGGACTCTTCACTTCTAAGG
ACAGCTAAAGTCCATCAGCAGTGGGGAGCTCACAATAGGGTAGCTCTGGGCACACAGAACTCTTATATGG
GAAAGGTTGGCCACCTCCTTCTACCGCATCGTCCCTAACTGTACCCAAGCCCAAAGTGGCCGACCTGGGC
CTGAGGTTCCTAATCTTTAAAGGCCTCATCCTTACAGCTGTAGGAGGTCATGCAAGGTCAGGGGGCTGAC
GCCTTGGAAACCAAGGGGGTCTCCAAAGATGTCCCTTTCATCAGTGGGGCAGTCCATCCCAAGCCCTTGG
TGACGAGGCCAAGGCTTGGAAAGGACCCACGGATATGTAGTGGAGAGTCATGGAATTTCTAGGGCCACAG
CTCTCCCTGCTGGTACTAGTGTCCTTTTCTCTTGTGATGCAGGAGTTCTTAGATGTCTGCCAGGGCTGCT
GTGGGACTTGAAGTTGTGATTAGAGAGGACCATCTTCACTCAGAGAAACAGGCCAGCCACAAGCTCTCCC
TGACAGTCGGAGCCTGCTGCCTCTAACGGGTCCTGTGCTTCAGGCCTTGGCCAATGTCATAGACCTCCAA
TGTCACAATCCAGTGTCTGCAGGGTCCCAGATGAAGAAGAAACCCTTCAAAACATGGGATGTCCCAGCAG
GGTAGCACTGCACCGGCCTGGACCTAAGTCACGAAGAAGACAAGGAATATCCAGGCCCTCCAATCCCTGC
GGTGGGCTACAACCTTTTGACAAATATTTCAAGATAACATGCGTCCTTTTTTTTTTTTCTTTTTTCTTTT
TTCTTTTTCTTTTTCTTTTCACTATCATAGTCACTCTGGTGAACCCAGACAAACAGACGAATCCGACTAC
AGCGCAACAGGGTGCGGACAGGAGAGAAAGGGCTGCGTCTCTGGAGATGGCTGGCTGCTCCAGCAGGGCA
GGCAGCACCGCTTCCATAGGACTGGAGGGAAAACATTTCAATCAAGGGGTATGTTCCCCAAATTGGGGTA
TGAAGGGCTGATTACGTGCATGGGGACTTAATGGCGGCTGAGCTCTGGGAGGCTAGCAATCACAAGCTGG
GGTGGAAGCAGAAGATGGGAGAAGTGTGGCCCTGCCCTGGGACTACTGACTGTTCATACTGATGCCAGGA
CATTGACACCTAACGTGGCTGCCTCCAGTTCAACATGGGAAGGAGTCAGGCCTAGGAGGCAACCGCTAAA
GTAAAAAAAAAAAAGCAGAGGTGTCCAGGGTAATCTCCAGGCACACACGGACTCCCATCCACGATGGGAA
ATGATGGAGCAAACCAAACAAGGTTGTAAGGTTCCTTGTGGGAGGCACACTGGTTGGATTCGTGCAACGT
AGGACTAGAGACCAAGGCCCAAATCTTTGCCTTCCCTGGACTCCAACCCCTAGTGTAGAGCAGATATTGG
CCATAACTACCCAGGGGCCAGGGATGGGGCTTGGGGAGGCTGGGCACTCAGGACGGTGAGACGTGATGTA
CGGACGGCAGTGACTGGCTCTCATGGCAGACGTGGGCATGATAGGACAGGTAGAGGGGATACAGTGGCTG
TGCGAGGATGGGAGGCCTGGGACCCACATCCCAGAATTACCACCCCCATCCCTCACACTGCAGAAGTGCC
AGAGGACCAGGCTTGAGAACAGGCAGATGTTCCCGCAAGAGGCACAAGTCCTTACAAAGAACTGGTTAGC
CCTAAAGTCCCAGGTCTGTATGGTGGCCAAAATCATGGCTGTAGTTCCAAACTTCAGAACTCAGTAACAC
AGGTTTTCCTGTGAGAGCAAAGGGAAGCTCCTCAGCTCAGGACCTCCCTCCCTGGAGGGTGGGAGCCAGT
GCCCTGGGATGGCAAGGTCAGCCTTCAGAGAACCAATCTACAAGGTGCCACCTTCTGGCCTACCTTCCTT
CTGCCCAATACCCCTTCTCCCATGGGCTGCCCTTCAGAAGGGGCACACACACCCACTGTACCCCACTGTG
CTTTCTCAGGCAGGCATCTGTGCTAGCTAAGACTGCTGCAGGCAGCCAGGGCTACCTGTGCTTCCCAAGC
TCCTTGGCAAGGAGCCAATGTCCCCTCTCCCAACCTGTCTTCCTCACCTCTCTCCTCTGACTCCCAGCCC
ACCCATCTCTCAGCCTTCACTATCACAGTCCTCCCTCAAACCCACACAAAGTTAACATCACCTGCCTACG
GCTCCACAAACACACCAAGTCCCAAGTCTTTCATTGCTGCCGCTGTCCCTGATGCCCCTAAGATGGGGCT
GTGGGCAATTAGTTGCCCTAGTCCCTCAGCCAATCCCCAGAAGCAGCCTCCATCCAAAGCCTCCTTCACC
CTCTAAAACTCAGAGGGGGGGGGCGGGGTCAATAACAATTGCCAAGGAAATGTTGGGTTTTGTTTGGCCA
TGGTTTTACGTGTTTTTTTTTTTTTCCTTCCTTAAAAATATTTTATTACTAGCCCACAAATCAATTTGGA
AAGATGAAATTTACTTTTTCCCATCACTGATTTTGAAGTCCCGAGCCAAACCCGAGCCACAAAAGCAGGT
TAGGTGACAAGCTGGTCAGCCTGTCTATGAGGAGCAGCGGGGAGGGCAGAGGGTGAGGGGCCAGGTCATT
CTTTTTTTTTTTTTTTTTTCCACACTCTCACTCTCTCTTCTCTCCATGATCAGTGACGGCCCCAGGGGCC
TGATCACAAACCCTGCTTGGCCAAAGAGGCGGACACTTCATCGGCTAACGTGGCAAGCTGTGGAGAGTCC
ACCATGTCGATGCTGCCCGTGGAGGAGACGTTGCTGAGGTGCCGTGGAGATGTGTCCCCAGACACCACAG
GTGACTTGTACACGATTTCTGCTCCATGGTCTGTCTTGGCTTTGGCATTCTCCCTGAAGGTCAGCTTGTG
GGTTTCAATCTTCTTATTCCCTCCTCCAGGGACATGGGTGATGTTATCCAAGGAGCCAATCTTCGACTGG
ACTCTATCCTTGAAGTCCAGCTTCTCTGATTTTACTTCTACCTGGCCACCTCCTGGCTTGTGATGGATGT
TCCCTAAGGAACCACACTTGGAGGTCACCTTGCTCAGGTCCACTGGCTTGTAGACTATTTGCACACTGCC
TCCGCCCGGGACGTGTTTGATATTGTCCTTTGAGCCACACTTGGACTGGACGTTGCTAAGATCCAGCTTC
TTATTAATTATCTGCACCTTGCCGCCTCCCGGCTGGTGCTTCAGGTTCTCAGTGGAGCCAATCTTGGACC
TGACGTTCTTTAGGTCTGGCATGGGCACAGGGGCAGTCTGTAGGCGGCTCTTACTGGCAGACGGTGACTT
AGGGGGAGTGCGAACCACTGCCACCTTTTTGGGCTCTCGGGTGGGCGGCGTTGGTAGGGATGGGGTACGG
GAGCGACTGCCAGGGGTTCCGGGCGAGCCGGGGCTGCTGTAGCCGCTTCGTTCTCCGGATTTTGGTGGTT
CACCTGATCCTGGAGGAGTCTTTGGGCTGGGTGTGGTCTTGGCTGGGATCCTGGTGGCATTGGATGTGCC
TTTCTGGCCCGGAGTGGCTGCTCCCCGAGGTGTGGCGATCTTCGCCCCCGTTTTGCCATCGGCGCCCTTG
GCTTTCTTCTCGTCATTTCCTGTCCTGTCTTTGCTTACGCCGGCCACTCGAGCTTGAGTCACATGCCCAG
CAGCTTGGTCCTCCATGTTCGGGGTGTCTCCGATGCCTGCTTCTTCAGCTGTGGTGCCTTCTGGGATCTC
CGTGTGGGACTGGGCAGTCGCCTGCTTGTCGGGAGCTCTCTCTTCCACTAGGGGCGCAGTCACGTCTTCA
GCAGTTGGAGTGCTCTTAGCATCAGAGGTCTCCGACCCTGGTTCTTCTGATCCATCATCGGCTGGGGGCT
GTGGGGGAGACTCTTTTAAGCCATGGTCCATGTCTCCTTCTTGGTCTTGGAGCATAGTGTAATCTCCGGC
CTGGTCTTCCATTGTGTCAAACTCCTGGCGGGGTTCAGCCATGCTGCTTCAAAGCCTGATAATCGACAGG
AGGCGAGGACAGAAGAGGACAGCGGAGGGGAAGGTGGTTGTGGCGGCGGCGACAGCAGAAGGTGGGCGGT
SEQ ID NO: 11
>XM_005624183.3 PREDICTED: Ganis lupus familiaris microtubule associated
protein tau (MAPT), transcript variant X23, mRNA
CGCGCTCGCGCTCTCAGCCACCCACCAGCTCCCGCACCAGCAGCAGCAGCGCCGCCGCCGCCGCCGCCGC
CGCCGCCGCCCACCTTCTGCTGCCGCCACCACAGCCACTTTCTCCTCTTTCCTCTCCTGTCCTCGCCCTC
TGTCGACTATCAGGTGGGCCTTGACCTAGGATGGCTGAGCCCCGCCAGGAGTTCACTGTGATGGAAGATC
ATGCTGGGACATACGGGAAAGATCTCCCCTCTCAGGGGGGCTACACCCTGCTGCAAGACCATGAGGGGGA
CGTGGATCACGGCCTGAAAGCTGAAGAAGCAGGCATTGGAGACACCCCCAACCTGGAAGACCAAGCTGCT
GGACATGTGACTCAAGCTCGCATGGTCAGTAAAGGCAAAGATGGGACTGGAACCGATGACAAAAAAGCCA
AGGGGGCTGATGGTAAAACTGGAACGAAGATCGCCACACCCCGGGGAGCGACCCCTTCAGGCCAGAAAGG
CCAGGCCAATGCCACCAGGATTCCAGCGAAAACCACGCCCTCCCCCAAGACCCCACCGGGCGGTGAATCT
GGAAAATCTGGGGATCGCAGTGGCTACAGCAGCCCCGGCTCCCCAGGCACTCCTGGCAGCCGCTCCCGCA
CCCCGTCCCTGCCAACCCCACCCACCCGGGAGCCCAAGAAGGTGGCGGTGGTCCGCACCCCACCCAAGTC
GCCGTCTGCAGCCAAGAGTCGCCTGCAGACCGCCCCTGTGCCCATGCCAGACCTAAAGAACGTCAGATCC
AAGATCGGCTCCACTGAAAACCTGAAGCACCAGCCAGGAGGTGGGAAGGTGCAAATAGTGTACAAACCAG
TGGATCTGAGCAAGGTGACCTCCAAGTGCGGCTCATTAGGCAACATCCATCATAAGCCAGGAGGCGGTCA
GGTGGAAGTCAAATCTGAGAAGCTGGACTTCAAGGACAGAGTCCAGTCGAAGATCGGGTCCCTGGACAAC
ATCACCCACGTCCCTGGCGGAGGGAATAAAAAGATCGAAACCCACAAGCTGACCTTCCGTGAGAACGCCA
AAGCCAAGACCGACCACGGGGCGGAGATCGTGTACAAGTCGCCCGTGGTGTCCGGGGACACGTCTCCGCG
GCACCTGAGCAACGTGTCCTCCACGGGCAGCATCGACATGGTCGACTCGCCCCAGCTCGCCACGCTAGCC
GACGAAGTGTCCGCCTCCCTGGCCAAGCAGGGTTTGTGATCAGGCCCCCGGGGCGGTCAATGATCGTGGA
GAGAAGAGAGTGTGGAAAAAAAAAGAATAATGATCTGGCCCTTCTCGCCCTCTGCCCTCCCCCAGCTGCT
CCTCACAGACCGGTTAATCGGTTAATCACTTAACCTGCTTTTGTCGCTCGGCTCTGGCTCGGGACTTCAA
AATCAGTGACGGGAAAAAGCAAATTTCATCTTTCCAAATTGATGGGTGGGCTAATAATAATAAAATATTT
TTAAAACCATTTAAAAA
SEQ ID NO: 12
>Reverse Complement of SEQ ID NO: 11
TTTTTAAATGGTTTTAA
AAATATTTTATTATTATTAGCCCACCCATCAATTTGGAAAGATGAAATTTGCTTTTTCCCGTCACTGATT
TTGAAGTCCCGAGCCAGAGCCGAGCGACAAAAGCAGGTTAAGTGATTAACCGATTAACCGGTCTGTGAGG
AGCAGCTGGGGGAGGGCAGAGGGCGAGAAGGGCCAGATCATTATTCTTTTTTTTTCCACACTCTCTTCTC
TCCACGATCATTGACCGCCCCGGGGGCCTGATCACAAACCCTGCTTGGCCAGGGAGGCGGACACTTCGTC
GGCTAGCGTGGCGAGCTGGGGCGAGTCGACCATGTCGATGCTGCCCGTGGAGGACACGTTGCTCAGGTGC
CGCGGAGACGTGTCCCCGGACACCACGGGCGACTTGTACACGATCTCCGCCCCGTGGTCGGTCTTGGCTT
TGGCGTTCTCACGGAAGGTCAGCTTGTGGGTTTCGATCTTTTTATTCCCTCCGCCAGGGACGTGGGTGAT
GTTGTCCAGGGACCCGATCTTCGACTGGACTCTGTCCTTGAAGTCCAGCTTCTCAGATTTGACTTCCACC
TGACCGCCTCCTGGCTTATGATGGATGTTGCCTAATGAGCCGCACTTGGAGGTCACCTTGCTCAGATCCA
CTGGTTTGTACACTATTTGCACCTTCCCACCTCCTGGCTGGTGCTTCAGGTTTTCAGTGGAGCCGATCTT
GGATCTGACGTTCTTTAGGTCTGGCATGGGCACAGGGGCGGTCTGCAGGCGACTCTTGGCTGCAGACGGC
GACTTGGGTGGGGTGCGGACCACCGCCACCTTCTTGGGCTCCCGGGTGGGTGGGGTTGGCAGGGACGGGG
TGCGGGAGCGGCTGCCAGGAGTGCCTGGGGAGCCGGGGCTGCTGTAGCCACTGCGATCCCCAGATTTTCC
AGATTCACCGCCCGGTGGGGTCTTGGGGGAGGGCGTGGTTTTCGCTGGAATCCTGGTGGCATTGGCCTGG
CCTTTCTGGCCTGAAGGGGTCGCTCCCCGGGGTGTGGCGATCTTCGTTCCAGTTTTACCATCAGCCCCCT
TGGCTTTTTTGTCATCGGTTCCAGTCCCATCTTTGCCTTTACTGACCATGCGAGCTTGAGTCACATGTCC
AGCAGCTTGGTCTTCCAGGTTGGGGGTGTCTCCAATGCCTGCTTCTTCAGCTTTCAGGCCGTGATCCACG
TCCCCCTCATGGTCTTGCAGCAGGGTGTAGCCCCCCTGAGAGGGGAGATCTTTCCCGTATGTCCCAGCAT
GATCTTCCATCACAGTGAACTCCTGGCGGGGCTCAGCCATCCTAGGTCAAGGCCCACCTGATAGTCGACA
GAGGGCGAGGACAGGAGAGGAAAGAGGAGAAAGTGGCTGTGGTGGCGGCAGCAGAAGGTGGGCGGCGGCG
GCGGCGGCGGCGGCGGCGGCGCTGCTGCTGCTGGTGCGGGAGCTGGTGGGTGGCTGAGAGCGCGAGCGCG
SEQ ID NO: 1533
> MAPT (NM_005910) exon 10
GTGCAAATAGTCTACAAACCAGTTGACCTGAGCAAGGTGACCTCCAAGTGTGGCTCATTA
GGCAACATCCATCATAAACCAG

The application's sequence listing, which the Patent Office published only in electronic form, follows.

SEQUENCE LISTING (3723 sequences)

SEQ ID NO: 1 - DNA, 5544 bp, Homo sapiens
ggacggccgagcggcagggcgctcgcgcgcgcccactagtggccggaggagaaggctcccgcggaggccgcgctgcccgccccctcccctggggaggctcgcgttcccgctgctcgcgcctgcgccgcccgccggcctcaggaacgcgccctcttcgccggcgcgcgccctcgcagtcaccgccacccaccagctccggcaccaacagcagcgccgctgccaccgcccaccttctgccgccgccaccacagccaccttctcctcctccgctgtcctctcccgtcctcgcctctgtcgactatcaggtgaactttgaaccaggatggctgagccccgccaggagttcgaagtgatggaagatcacgctgggacgtacgggttgggggacaggaaagatcaggggggctacaccatgcaccaagaccaagagggtgacacggacgctggcctgaaagctgaagaagcaggcattggagacacccccagcctggaagacgaagctgctggtcacgtgacccaagctcgcatggtcagtaaaagcaaagacgggactggaagcgatgacaaaaaagccaagggggctgatggtaaaacgaagatcgccacaccgcggggagcagcccctccaggccagaagggccaggccaacgccaccaggattccagcaaaaaccccgcccgctccaaagacaccacccagctctggtgaacctccaaaatcaggggatcgcagcggctacagcagccccggctccccaggcactcccggcagccgctcccgcaccccgtcccttccaaccccacccacccgggagcccaagaaggtggcagtggtccgtactccacccaagtcgccgtcttccgccaagagccgcctgcagacagcccccgtgcccatgccagacctgaagaatgtcaagtccaagatcggctccactgagaacctgaagcaccagccgggaggcgggaaggtgcaaatagtctacaaaccagttgacctgagcaaggtgacctccaagtgtggctcattaggcaacatccatcataaaccaggaggtggccaggtggaagtaaaatctgagaagcttgacttcaaggacagagtccagtcgaagattgggtccctggacaatatcacccacgtccctggcggaggaaataaaaagattgaaacccacaagctgaccttccgcgagaacgccaaagccaagacagaccacggggcggagatcgtgtacaagtcgccagtggtgtctggggacacgtctccacggcatctcagcaatgtctcctccaccggcagcatcgacatggtagactcgccccagctcgccacgctagctgacgaggtgtctgcctccctggccaagcagggtttgtgatcaggcccctggggcggtcaataattgtggagaggagagaatgagagagtgtggaaaaaaaaagaataatgacccggcccccgccctctgcccccagctgctcctcgcagttcggttaattggttaatcacttaacctgcttttgtcactcggctttggctcgggacttcaaaatcagtgatgggagtaagagcaaatttcatctttccaaattgatgggtgggctagtaataaaatatttaaaaaaaaacattcaaaaacatggccacatccaacatttcctcaggcaattccttttgattcttttttcttccccctccatgtagaagagggagaaggagaggctctgaaagctgcttctgggggatttcaagggactgggggtgccaaccacctctggccctgttgtgggggtgtcacagaggcagtggcagcaacaaaggatttgaaacttggtgtgttcgtggagccacaggcagacgatgtcaaccttgtgtgagtgtgacgggggttggggtggggcgggaggccacgggggaggccgaggcaggggctgggcagaggggagaggaagcacaagaagtgggagtgggagaggaagccacgtgctggagagtagacatccccctccttgccgctgggagagccaaggcctatgccacctgcagcgtctgagcggccgcctgtccttggtggccgggggtgggggcctgctgtgggtcagtgtgccaccctctgcagggcagcctgtgggagaagggacagcgggtaaaaagagaaggcaagctggcaggagggtggcacttcgtggatgacctccttagaaaagactgaccttgatgtcttgagagcgctggcctcttcctccctccctgcagggtagggggcctgagttgaggggcttccctctgctccacagaaaccctgttttattgagttctgaaggttggaactgctgccatgattttggccactttgcagacctgggactttagggctaaccagttctctttgtaaggacttgtgcctcttgggagacgtccacccgtttccaagcctgggccactggcatctctggagtgtgtgggggtctgggaggcaggtcccgagccccctgtccttcccacggccactgcagtcaccccgtctgcgccgctgtgctgttgtctgccgtgagagcccaatcactgcctatacccctcatcacacgtcacaatgtcccgaattcccagcctcaccaccccttctcagtaatgaccctggttggttgcaggaggtacctactccatactgagggtgaaattaagggaaggcaaagtccaggcacaagagtgggaccccagcctctcactctcagttccactcatccaactgggaccctcaccacgaatctcatgatctgattcggttccctgtctcctcctcccgtcacagatgtgagccagggcactgctcagctgtgaccctaggtgtttctgccttgttgacatggagagagccctttcccctgagaaggcctggccccttcctgtgctgagcccacagcagcaggctgggtgtcttggttgtcagtggtggcaccaggatggaagggcaaggcacccagggcaggcccacagtcccgctgtcccccacttgcaccctagcttgtagctgccaacctcccagacagcccagcccgctgctcagctccacatgcatagtatcagccctccacacccgacaaaggggaacacacccccttggaaatggttcttttcccccagtcccagctggaagccatgctgtctgttctgctggagcagctgaacatatacatagatgttgccctgccctccccatctgcaccctgttgagttgtagttggatttgtctgtttatgcttggattcaccagagtgactatgatagtgaaaagaaaaaaaaaaaaaaaaaaggacgcatgtatcttgaaatgcttgtaaagaggtttctaacccaccctcacgaggtgtctctcacccccacactgggactcgtgtggcctgtgtggtgccaccctgctggggcctcccaagttttgaaaggctttcctcagcacctgggacccaacagagaccagcttctagcagctaaggaggccgttcagctgtgacgaaggcctgaagcacaggattaggactgaagcgatgatgtccccttccctacttccccttggggctccctgtgtcagggcacagactaggtcttgtggctggtctggcttgcggcgcgaggatggttctctctggtcatagcccgaagtctcatggcagtcccaaaggaggcttacaactcctgcatcacaagaaaaaggaagccactgccagctggggggatctgcagctcccagaagctccgtgagcctcagccacccctcagactgggttcctctccaagctcgccctctggaggggcagcgcagcctcccaccaagggccctgcgaccacagcagggattgggatgaattgcctgtcctggatctgctctagaggcccaagctgcctgcctgaggaaggatgacttgacaagtcaggagacactgttcccaaagccttgaccagagcacctcagcccgctgaccttgcacaaactccatctgctgccatgagaaaagggaagccgcctttgcaaaacattgctgcctaaagaaactcagcagcctcaggcccaattctgccacttctggtttgggtacagttaaaggcaaccctgagggacttggcagtagaaatccagggcctcccctggggctggcagcttcgtgtgcagctagagctttacctgaaaggaagtctctgggcccagaactctccaccaagagcctccctgccgttcgctgagtcccagcaattctcctaagttgaagggatctgagaaggagaaggaaatgtggggtagatttggtggtggttagagatatgcccccctcattactgccaacagtttcggctgcatttcttcacgcacctcggttcctcttcctgaagttcttgtgccctgctcttcagcaccatgggccttcttatacggaaggctctgggatctcccccttgtggggcaggctcttggggccagcctaagatcatggtttagggtgatcagtgctggcagataaattgaaaaggcacgctggcttgtgatcttaaatgaggacaatccccccagggctgggcactcctcccctcccctcacttctcccacctgcagagccagtgtccttgggtgggctagataggatatactgtatgccggctccttcaagctgctgactcactttatcaatagttccatttaaattgacttcagtggtgagactgtatcctgtttgctattgcttgttgtgctatggggggaggggggaggaatgtgtaagatagttaacatgggcaaagggagatcttggggtgcagcacttaaactgcctcgtaacccttttcatgatttcaaccacatttgctagagggagggagcagccacggagttagaggcccttggggtttctcttttccactgacaggctttcccaggcagctggctagttcattccctccccagccaggtgcaggcgtaggaatatggacatctggttgctttggcctgctgccctctttcaggggtcctaagcccacaatcatgcctccctaagaccttggcatccttccctctaagccgttggcacctctgtgccacctctcacactggctccagacacacagcctgtgcttttggagctgagatcactcgcttcaccctcctcatctttgttctccaagtaaagccacgaggtcggggcgagggcagaggtgatcacctgcgtgtcccatctacagacctgcagcttcataaaacttctgatttctcttcagctttgaaaagggttaccctgggcactggcctagagcctcacctcctaatagacttagccccatgagtttgccatgttgagcaggactatttctggcacttgcaagtcccatgatttcttcggtaattctgagggtggggggagggacatgaaatcatcttagcttagctttctgtctgtgaatgtctatatagtgtattgtgtgttttaacaaatgatttacactgactgttgctgtaaaagtgaatttggaaataaagttattactctgattaaa

SEQ ID NO: 2 - DNA, 5544 bp, Homo sapiens
tttaatcagagtaataactttatttccaaattcacttttacagcaacagtcagtgtaaatcatttgttaaaacacacaatacactatatagacattcacagacagaaagctaagctaagatgatttcatgtccctccccccaccctcagaattaccgaagaaatcatgggacttgcaagtgccagaaatagtcctgctcaacatggcaaactcatggggctaagtctattaggaggtgaggctctaggccagtgcccagggtaacccttttcaaagctgaagagaaatcagaagttttatgaagctgcaggtctgtagatgggacacgcaggtgatcacctctgccctcgccccgacctcgtggctttacttggagaacaaagatgaggagggtgaagcgagtgatctcagctccaaaagcacaggctgtgtgtctggagccagtgtgagaggtggcacagaggtgccaacggcttagagggaaggatgccaaggtcttagggaggcatgattgtgggcttaggacccctgaaagagggcagcaggccaaagcaaccagatgtccatattcctacgcctgcacctggctggggagggaatgaactagccagctgcctgggaaagcctgtcagtggaaaagagaaaccccaagggcctctaactccgtggctgctccctccctctagcaaatgtggttgaaatcatgaaaagggttacgaggcagtttaagtgctgcaccccaagatctccctttgcccatgttaactatcttacacattcctcccccctccccccatagcacaacaagcaatagcaaacaggatacagtctcaccactgaagtcaatttaaatggaactattgataaagtgagtcagcagcttgaaggagccggcatacagtatatcctatctagcccacccaaggacactggctctgcaggtgggagaagtgaggggaggggaggagtgcccagccctggggggattgtcctcatttaagatcacaagccagcgtgccttttcaatttatctgccagcactgatcaccctaaaccatgatcttaggctggccccaagagcctgccccacaagggggagatcccagagccttccgtataagaaggcccatggtgctgaagagcagggcacaagaacttcaggaagaggaaccgaggtgcgtgaagaaatgcagccgaaactgttggcagtaatgaggggggcatatctctaaccaccaccaaatctaccccacatttccttctccttctcagatcccttcaacttaggagaattgctgggactcagcgaacggcagggaggctcttggtggagagttctgggcccagagacttcctttcaggtaaagctctagctgcacacgaagctgccagccccaggggaggccctggatttctactgccaagtccctcagggttgcctttaactgtacccaaaccagaagtggcagaattgggcctgaggctgctgagtttctttaggcagcaatgttttgcaaaggcggcttcccttttctcatggcagcagatggagtttgtgcaaggtcagcgggctgaggtgctctggtcaaggctttgggaacagtgtctcctgacttgtcaagtcatccttcctcaggcaggcagcttgggcctctagagcagatccaggacaggcaattcatcccaatccctgctgtggtcgcagggcccttggtgggaggctgcgctgcccctccagagggcgagcttggagaggaacccagtctgaggggtggctgaggctcacggagcttctgggagctgcagatccccccagctggcagtggcttcctttttcttgtgatgcaggagttgtaagcctcctttgggactgccatgagacttcgggctatgaccagagagaaccatcctcgcgccgcaagccagaccagccacaagacctagtctgtgccctgacacagggagccccaaggggaagtagggaaggggacatcatcgcttcagtcctaatcctgtgcttcaggccttcgtcacagctgaacggcctccttagctgctagaagctggtctctgttgggtcccaggtgctgaggaaagcctttcaaaacttgggaggccccagcagggtggcaccacacaggccacacgagtcccagtgtgggggtgagagacacctcgtgagggtgggttagaaacctctttacaagcatttcaagatacatgcgtccttttttttttttttttttcttttcactatcatagtcactctggtgaatccaagcataaacagacaaatccaactacaactcaacagggtgcagatggggagggcagggcaacatctatgtatatgttcagctgctccagcagaacagacagcatggcttccagctgggactgggggaaaagaaccatttccaagggggtgtgttcccctttgtcgggtgtggagggctgatactatgcatgtggagctgagcagcgggctgggctgtctgggaggttggcagctacaagctagggtgcaagtgggggacagcgggactgtgggcctgccctgggtgccttgcccttccatcctggtgccaccactgacaaccaagacacccagcctgctgctgtgggctcagcacaggaaggggccaggccttctcaggggaaagggctctctccatgtcaacaaggcagaaacacctagggtcacagctgagcagtgccctggctcacatctgtgacgggaggaggagacagggaaccgaatcagatcatgagattcgtggtgagggtcccagttggatgagtggaactgagagtgagaggctggggtcccactcttgtgcctggactttgccttcccttaatttcaccctcagtatggagtaggtacctcctgcaaccaaccagggtcattactgagaaggggtggtgaggctgggaattcgggacattgtgacgtgtgatgaggggtataggcagtgattgggctctcacggcagacaacagcacagcggcgcagacggggtgactgcagtggccgtgggaaggacagggggctcgggacctgcctcccagacccccacacactccagagatgccagtggcccaggcttggaaacgggtggacgtctcccaagaggcacaagtccttacaaagagaactggttagccctaaagtcccaggtctgcaaagtggccaaaatcatggcagcagttccaaccttcagaactcaataaaacagggtttctgtggagcagagggaagcccctcaactcaggccccctaccctgcagggagggaggaagaggccagcgctctcaagacatcaaggtcagtcttttctaaggaggtcatccacgaagtgccaccctcctgccagcttgccttctctttttacccgctgtcccttctcccacaggctgccctgcagagggtggcacactgacccacagcaggcccccacccccggccaccaaggacaggcggccgctcagacgctgcaggtggcataggccttggctctcccagcggcaaggagggggatgtctactctccagcacgtggcttcctctcccactcccacttcttgtgcttcctctcccctctgcccagcccctgcctcggcctcccccgtggcctcccgccccaccccaacccccgtcacactcacacaaggttgacatcgtctgcctgtggctccacgaacacaccaagtttcaaatcctttgttgctgccactgcctctgtgacacccccacaacagggccagaggtggttggcacccccagtcccttgaaatcccccagaagcagctttcagagcctctccttctccctcttctacatggagggggaagaaaaaagaatcaaaaggaattgcctgaggaaatgttggatgtggccatgtttttgaatgtttttttttaaatattttattactagcccacccatcaatttggaaagatgaaatttgctcttactcccatcactgattttgaagtcccgagccaaagccgagtgacaaaagcaggttaagtgattaaccaattaaccgaactgcgaggagcagctgggggcagagggcgggggccgggtcattattctttttttttccacactctctcattctctcctctccacaattattgaccgccccaggggcctgatcacaaaccctgcttggccagggaggcagacacctcgtcagctagcgtggcgagctggggcgagtctaccatgtcgatgctgccggtggaggagacattgctgagatgccgtggagacgtgtccccagacaccactggcgacttgtacacgatctccgccccgtggtctgtcttggctttggcgttctcgcggaaggtcagcttgtgggtttcaatctttttatttcctccgccagggacgtgggtgatattgtccagggacccaatcttcgactggactctgtccttgaagtcaagcttctcagattttacttccacctggccacctcctggtttatgatggatgttgcctaatgagccacacttggaggtcaccttgctcaggtcaactggtttgtagactatttgcaccttcccgcctcccggctggtgcttcaggttctcagtggagccgatcttggacttgacattcttcaggtctggcatgggcacgggggctgtctgcaggcggctcttggcggaagacggcgacttgggtggagtacggaccactgccaccttcttgggctcccgggtgggtggggttggaagggacggggtgcgggagcggctgccgggagtgcctggggagccggggctgctgtagccgctgcgatcccctgattttggaggttcaccagagctgggtggtgtctttggagcgggcggggtttttgctggaatcctggtggcgttggcctggcccttctggcctggaggggctgctccccgcggtgtggcgatcttcgttttaccatcagcccccttggcttttttgtcatcgcttccagtcccgtctttgcttttactgaccatgcgagcttgggtcacgtgaccagcagcttcgtcttccaggctgggggtgtctccaatgcctgcttcttcagctttcaggccagcgtccgtgtcaccctcttggtcttggtgcatggtgtagcccccctgatctttcctgtcccccaacccgtacgtcccagcgtgatcttccatcacttcgaactcctggcggggctcagccatcctggttcaaagttcacctgatagtcgacagaggcgaggacgggagaggacagcggaggaggagaaggtggctgtggtggcggcggcagaaggtgggcggtggcagcggcgctgctgttggtgccggagctggtgggtggcggtgactgcgagggcgcgcgccggcgaagagggcgcgttcctgaggccggcgggcggcgcaggcgcgagcagcgggaacgcgagcctccccaggggagggggcgggcagcgcggcctccgcgggagccttctcctccggccactagtgggcgcgcgcgagcgccctgccgctcggccgtcc

SEQ ID NO: 3 - DNA, 5811 bp, Homo sapiens
ggacggccgagcggcagggcgctcgcgcgcgcccactagtggccggaggagaaggctcccgcggaggccgcgctgcccgccccctcccctggggaggctcgcgttcccgctgctcgcgcctgcgccgcccgccggcctcaggaacgcgccctcttcgccggcgcgcgccctcgcagtcaccgccacccaccagctccggcaccaacagcagcgccgctgccaccgcccaccttctgccgccgccaccacagccaccttctcctcctccgctgtcctctcccgtcctcgcctctgtcgactatcaggtgaactttgaaccaggatggctgagccccgccaggagttcgaagtgatggaagatcacgctgggacgtacgggttgggggacaggaaagatcaggggggctacaccatgcaccaagaccaagagggtgacacggacgctggcctgaaagaatctcccctgcagacccccactgaggacggatctgaggaaccgggctctgaaacctctgatgctaagagcactccaacagcggaagatgtgacagcacccttagtggatgagggagctcccggcaagcaggctgccgcgcagccccacacggagatcccagaaggaaccacagctgaagaagcaggcattggagacacccccagcctggaagacgaagctgctggtcacgtgacccaagctcgcatggtcagtaaaagcaaagacgggactggaagcgatgacaaaaaagccaagggggctgatggtaaaacgaagatcgccacaccgcggggagcagcccctccaggccagaagggccaggccaacgccaccaggattccagcaaaaaccccgcccgctccaaagacaccacccagctctggtgaacctccaaaatcaggggatcgcagcggctacagcagccccggctccccaggcactcccggcagccgctcccgcaccccgtcccttccaaccccacccacccgggagcccaagaaggtggcagtggtccgtactccacccaagtcgccgtcttccgccaagagccgcctgcagacagcccccgtgcccatgccagacctgaagaatgtcaagtccaagatcggctccactgagaacctgaagcaccagccgggaggcgggaaggtgcagataattaataagaagctggatcttagcaacgtccagtccaagtgtggctcaaaggataatatcaaacacgtcccgggaggcggcagtgtgcaaatagtctacaaaccagttgacctgagcaaggtgacctccaagtgtggctcattaggcaacatccatcataaaccaggaggtggccaggtggaagtaaaatctgagaagcttgacttcaaggacagagtccagtcgaagattgggtccctggacaatatcacccacgtccctggcggaggaaataaaaagattgaaacccacaagctgaccttccgcgagaacgccaaagccaagacagaccacggggcggagatcgtgtacaagtcgccagtggtgtctggggacacgtctccacggcatctcagcaatgtctcctccaccggcagcatcgacatggtagactcgccccagctcgccacgctagctgacgaggtgtctgcctccctggccaagcagggtttgtgatcaggcccctggggcggtcaataattgtggagaggagagaatgagagagtgtggaaaaaaaaagaataatgacccggcccccgccctctgcccccagctgctcctcgcagttcggttaattggttaatcacttaacctgcttttgtcactcggctttggctcgggacttcaaaatcagtgatgggagtaagagcaaatttcatctttccaaattgatgggtgggctagtaataaaatatttaaaaaaaaacattcaaaaacatggccacatccaacatttcctcaggcaattccttttgattcttttttcttccccctccatgtagaagagggagaaggagaggctctgaaagctgcttctgggggatttcaagggactgggggtgccaaccacctctggccctgttgtgggggtgtcacagaggcagtggcagcaacaaaggatttgaaacttggtgtgttcgtggagccacaggcagacgatgtcaaccttgtgtgagtgtgacgggggttggggtggggcgggaggccacgggggaggccgaggcaggggctgggcagaggggagaggaagcacaagaagtgggagtgggagaggaagccacgtgctggagagtagacatccccctccttgccgctgggagagccaaggcctatgccacctgcagcgtctgagcggccgcctgtccttggtggccgggggtgggggcctgctgtgggtcagtgtgccaccctctgcagggcagcctgtgggagaagggacagcgggtaaaaagagaaggcaagctggcaggagggtggcacttcgtggatgacctccttagaaaagactgaccttgatgtcttgagagcgctggcctcttcctccctccctgcagggtagggggcctgagttgaggggcttccctctgctccacagaaaccctgttttattgagttctgaaggttggaactgctgccatgattttggccactttgcagacctgggactttagggctaaccagttctctttgtaaggacttgtgcctcttgggagacgtccacccgtttccaagcctgggccactggcatctctggagtgtgtgggggtctgggaggcaggtcccgagccccctgtccttcccacggccactgcagtcaccccgtctgcgccgctgtgctgttgtctgccgtgagagcccaatcactgcctatacccctcatcacacgtcacaatgtcccgaattcccagcctcaccaccccttctcagtaatgaccctggttggttgcaggaggtacctactccatactgagggtgaaattaagggaaggcaaagtccaggcacaagagtgggaccccagcctctcactctcagttccactcatccaactgggaccctcaccacgaatctcatgatctgattcggttccctgtctcctcctcccgtcacagatgtgagccagggcactgctcagctgtgaccctaggtgtttctgccttgttgacatggagagagccctttcccctgagaaggcctggccccttcctgtgctgagcccacagcagcaggctgggtgtcttggttgtcagtggtggcaccaggatggaagggcaaggcacccagggcaggcccacagtcccgctgtcccccacttgcaccctagcttgtagctgccaacctcccagacagcccagcccgctgctcagctccacatgcatagtatcagccctccacacccgacaaaggggaacacacccccttggaaatggttcttttcccccagtcccagctggaagccatgctgtctgttctgctggagcagctgaacatatacatagatgttgccctgccctccccatctgcaccctgttgagttgtagttggatttgtctgtttatgcttggattcaccagagtgactatgatagtgaaaagaaaaaaaaaaaaaaaaaaggacgcatgtatcttgaaatgcttgtaaagaggtttctaacccaccctcacgaggtgtctctcacccccacactgggactcgtgtggcctgtgtggtgccaccctgctggggcctcccaagttttgaaaggctttcctcagcacctgggacccaacagagaccagcttctagcagctaaggaggccgttcagctgtgacgaaggcctgaagcacaggattaggactgaagcgatgatgtccccttccctacttccccttggggctccctgtgtcagggcacagactaggtcttgtggctggtctggcttgcggcgcgaggatggttctctctggtcatagcccgaagtctcatggcagtcccaaaggaggcttacaactcctgcatcacaagaaaaaggaagccactgccagctggggggatctgcagctcccagaagctccgtgagcctcagccacccctcagactgggttcctctccaagctcgccctctggaggggcagcgcagcctcccaccaagggccctgcgaccacagcagggattgggatgaattgcctgtcctggatctgctctagaggcccaagctgcctgcctgaggaaggatgacttgacaagtcaggagacactgttcccaaagccttgaccagagcacctcagcccgctgaccttgcacaaactccatctgctgccatgagaaaagggaagccgcctttgcaaaacattgctgcctaaagaaactcagcagcctcaggcccaattctgccacttctggtttgggtacagttaaaggcaaccctgagggacttggcagtagaaatccagggcctcccctggggctggcagcttcgtgtgcagctagagctttacctgaaaggaagtctctgggcccagaactctccaccaagagcctccctgccgttcgctgagtcccagcaattctcctaagttgaagggatctgagaaggagaaggaaatgtggggtagatttggtggtggttagagatatgcccccctcattactgccaacagtttcggctgcatttcttcacgcacctcggttcctcttcctgaagttcttgtgccctgctcttcagcaccatgggccttcttatacggaaggctctgggatctcccccttgtggggcaggctcttggggccagcctaagatcatggtttagggtgatcagtgctggcagataaattgaaaaggcacgctggcttgtgatcttaaatgaggacaatccccccagggctgggcactcctcccctcccctcacttctcccacctgcagagccagtgtccttgggtgggctagataggatatactgtatgccggctccttcaagctgctgactcactttatcaatagttccatttaaattgacttcagtggtgagactgtatcctgtttgctattgcttgttgtgctatggggggaggggggaggaatgtgtaagatagttaacatgggcaaagggagatcttggggtgcagcacttaaactgcctcgtaacccttttcatgatttcaaccacatttgctagagggagggagcagccacggagttagaggcccttggggtttctcttttccactgacaggctttcccaggcagctggctagttcattccctccccagccaggtgcaggcgtaggaatatggacatctggttgctttggcctgctgccctctttcaggggtcctaagcccacaatcatgcctccctaagaccttggcatccttccctctaagccgttggcacctctgtgccacctctcacactggctccagacacacagcctgtgcttttggagctgagatcactcgcttcaccctcctcatctttgttctccaagtaaagccacgaggtcggggcgagggcagaggtgatcacctgcgtgtcccatctacagacctgcagcttcataaaacttctgatttctcttcagctttgaaaagggttaccctgggcactggcctagagcctcacctcctaatagacttagccccatgagtttgccatgttgagcaggactatttctggcacttgcaagtcccatgatttcttcggtaattctgagggtggggggagggacatgaaatcatcttagcttagctttctgtctgtgaatgtctatatagtgtattgtgtgttttaacaaatgatttacactgactgttgctgtaaaagtgaatttggaaataaagttattactctgattaaa

SEQ ID NO: 4 - DNA, 5810 bp, Homo sapiens
tttaatcagagtaataactttatttccaaattcacttttacagcacagtcagtgtaaatcatttgttaaaacacacaatacactatatagacattcacagacagaaagctaagctaagatgatttcatgtccctccccccaccctcagaattaccgaagaaatcatgggacttgcaagtgccagaaatagtcctgctcaacatggcaaactcatggggctaagtctattaggaggtgaggctctaggccagtgcccagggtaacccttttcaaagctgaagagaaatcagaagttttatgaagctgcaggtctgtagatgggacacgcaggtgatcacctctgccctcgccccgacctcgtggctttacttggagaacaaagatgaggagggtgaagcgagtgatctcagctccaaaagcacaggctgtgtgtctggagccagtgtgagaggtggcacagaggtgccaacggcttagagggaaggatgccaaggtcttagggaggcatgattgtgggcttaggacccctgaaagagggcagcaggccaaagcaaccagatgtccatattcctacgcctgcacctggctggggagggaatgaactagccagctgcctgggaaagcctgtcagtggaaaagagaaaccccaagggcctctaactccgtggctgctccctccctctagcaaatgtggttgaaatcatgaaaagggttacgaggcagtttaagtgctgcaccccaagatctccctttgcccatgttaactatcttacacattcctcccccctccccccatagcacaacaagcaatagcaaacaggatacagtctcaccactgaagtcaatttaaatggaactattgataaagtgagtcagcagcttgaaggagccggcatacagtatatcctatctagcccacccaaggacactggctctgcaggtgggagaagtgaggggaggggaggagtgcccagccctggggggattgtcctcatttaagatcacaagccagcgtgccttttcaatttatctgccagcactgatcaccctaaaccatgatcttaggctggccccaagagcctgccccacaagggggagatcccagagccttccgtataagaaggcccatggtgctgaagagcagggcacaagaacttcaggaagaggaaccgaggtgcgtgaagaaatgcagccgaaactgttggcagtaatgaggggggcatatctctaaccaccaccaaatctaccccacatttccttctccttctcagatcccttcaacttaggagaattgctgggactcagcgaacggcagggaggctcttggtggagagttctgggcccagagacttcctttcaggtaaagctctagctgcacacgaagctgccagccccaggggaggccctggatttctactgccaagtccctcagggttgcctttaactgtacccaaaccagaagtggcagaattgggcctgaggctgctgagtttctttaggcagcaatgttttgcaaaggcggcttcccttttctcatggcagcagatggagtttgtgcaaggtcagcgggctgaggtgctctggtcaaggctttgggaacagtgtctcctgacttgtcaagtcatccttcctcaggcaggcagcttgggcctctagagcagatccaggacaggcaattcatcccaatccctgctgtggtcgcagggcccttggtgggaggctgcgctgcccctccagagggcgagcttggagaggaacccagtctgaggggtggctgaggctcacggagcttctgggagctgcagatccccccagctggcagtggcttcctttttcttgtgatgcaggagttgtaagcctcctttgggactgccatgagacttcgggctatgaccagagagaaccatcctcgcgccgcaagccagaccagccacaagacctagtctgtgccctgacacagggagccccaaggggaagtagggaaggggacatcatcgcttcagtcctaatcctgtgcttcaggccttcgtcacagctgaacggcctccttagctgctagaagctggtctctgttgggtcccaggtgctgaggaaagcctttcaaaacttgggaggccccagcagggtggcaccacacaggccacacgagtcccagtgtgggggtgagagacacctcgtgagggtgggttagaaacctctttacaagcatttcaagatacatgcgtccttttttttttttttttttcttttcactatcatagtcactctggtgaatccaagcataaacagacaaatccaactacaactcaacagggtgcagatggggagggcagggcaacatctatgtatatgttcagctgctccagcagaacagacagcatggcttccagctgggactgggggaaaagaaccatttccaagggggtgtgttcccctttgtcgggtgtggagggctgatactatgcatgtggagctgagcagcgggctgggctgtctgggaggttggcagctacaagctagggtgcaagtgggggacagcgggactgtgggcctgccctgggtgccttgcccttccatcctggtgccaccactgacaaccaagacacccagcctgctgctgtgggctcagcacaggaaggggccaggccttctcaggggaaagggctctctccatgtcaacaaggcagaaacacctagggtcacagctgagcagtgccctggctcacatctgtgacgggaggaggagacagggaaccgaatcagatcatgagattcgtggtgagggtcccagttggatgagtggaactgagagtgagaggctggggtcccactcttgtgcctggactttgccttcccttaatttcaccctcagtatggagtaggtacctcctgcaaccaaccagggtcattactgagaaggggtggtgaggctgggaattcgggacattgtgacgtgtgatgaggggtataggcagtgattgggctctcacggcagacaacagcacagcggcgcagacggggtgactgcagtggccgtgggaaggacagggggctcgggacctgcctcccagacccccacacactccagagatgccagtggcccaggcttggaaacgggtggacgtctcccaagaggcacaagtccttacaaagagaactggttagccctaaagtcccaggtctgcaaagtggccaaaatcatggcagcagttccaaccttcagaactcaataaaacagggtttctgtggagcagagggaagcccctcaactcaggccccctaccctgcagggagggaggaagaggccagcgctctcaagacatcaaggtcagtcttttctaaggaggtcatccacgaagtgccaccctcctgccagcttgccttctctttttacccgctgtcccttctcccacaggctgccctgcagagggtggcacactgacccacagcaggcccccacccccggccaccaaggacaggcggccgctcagacgctgcaggtggcataggccttggctctcccagcggcaaggagggggatgtctactctccagcacgtggcttcctctcccactcccacttcttgtgcttcctctcccctctgcccagcccctgcctcggcctcccccgtggcctcccgccccaccccaacccccgtcacactcacacaaggttgacatcgtctgcctgtggctccacgaacacaccaagtttcaaatcctttgttgctgccactgcctctgtgacacccccacaacagggccagaggtggttggcacccccagtcccttgaaatcccccagaagcagctttcagagcctctccttctccctcttctacatggagggggaagaaaaaagaatcaaaaggaattgcctgaggaaatgttggatgtggccatgtttttgaatgtttttttttaaatattttattactagcccacccatcaatttggaaagatgaaatttgctcttactcccatcactgattttgaagtcccgagccaaagccgagtgacaaaagcaggttaagtgattaaccaattaaccgaactgcgaggagcagctgggggcagagggcgggggccgggtcattattctttttttttccacactctctcattctctcctctccacaattattgaccgccccaggggcctgatcacaaaccctgcttggccagggaggcagacacctcgtcagctagcgtggcgagctggggcgagtctaccatgtcgatgctgccggtggaggagacattgctgagatgccgtggagacgtgtccccagacaccactggcgacttgtacacgatctccgccccgtggtctgtcttggctttggcgttctcgcggaaggtcagcttgtgggtttcaatctttttatttcctccgccagggacgtgggtgatattgtccagggacccaatcttcgactggactctgtccttgaagtcaagcttctcagattttacttccacctggccacctcctggtttatgatggatgttgcctaatgagccacacttggaggtcaccttgctcaggtcaactggtttgtagactatttgcacactgccgcctcccgggacgtgtttgatattatcctttgagccacacttggactggacgttgctaagatccagcttcttattaattatctgcaccttcccgcctcccggctggtgcttcaggttctcagtggagccgatcttggacttgacattcttcaggtctggcatgggcacgggggctgtctgcaggcggctcttggcggaagacggcgacttgggtggagtacggaccactgccaccttcttgggctcccgggtgggtggggttggaagggacggggtgcgggagcggctgccgggagtgcctggggagccggggctgctgtagccgctgcgatcccctgattttggaggttcaccagagctgggtggtgtctttggagcgggcggggtttttgctggaatcctggtggcgttggcctggcccttctggcctggaggggctgctccccgcggtgtggcgatcttcgttttaccatcagcccccttggcttttttgtcatcgcttccagtcccgtctttgcttttactgaccatgcgagcttgggtcacgtgaccagcagcttcgtcttccaggctgggggtgtctccaatgcctgcttcttcagctgtggttccttctgggatctccgtgtggggctgcgcggcagcctgcttgccgggagctccctcatccactaagggtgctgtcacatcttccgctgttggagtgctcttagcatcagaggtttcagagcccggttcctcagatccgtcctcagtgggggtctgcaggggagattctttcaggccagcgtccgtgtcaccctcttggtcttggtgcatggtgtagcccccctgatctttcctgtcccccaacccgtacgtcccagcgtgatcttccatcacttcgaactcctggcggggctcagccatcctggttcaaagttcacctgatagtcgacagaggcgaggacgggagaggacagcggaggaggagaaggtggctgtggtggcggcggcagaaggtgggcggtggcagcggcgctgctgttggtgccggagctggtgggtggcggtgactgcgagggcgcgcgccggcgaagagggcgcgttcctgaggccggcgggcggcgcaggcgcgagcagcgggaacgcgagcctccccaggggagggggcgggcagcgcggcctccgcgggagccttctcctccggccactagtgggcgcgcgcgagcgccctgccgctcggccgtcc

SEQ ID NO: 5 - DNA, 5396 bp, Mus musculus
ccgccggcctccagaacgcgctttctcggccgcgcgcgctctcagtctccgccacccaccagctccagcaccagcagcagcgccgccgccaccgcccaccttctgccgccgccgccacaaccaccttctcctccgctgtcctcttctgtcctcgccttctgtcgattatcaggctttgaaccagtatggctgaccctcgccaggagtttgacacaatggaagaccatgctggagattacactctgctccaagaccaagaaggagacatggaccatggcttaaaagagtctcccccacagccccccgccgatgatggagcggaggaaccagggtcggagacctccgatgctaagagcactccaactgctgaagacgtgactgcgcccctagtggatgagagagctcccgacaagcaggccgctgcccagccccacacggagatcccagaaggaattacagccgaagaagcaggcatcggagacaccccgaaccaggaggaccaagccgctgggcatgtgactcaagctcgtgtggccagcaaagacaggacaggaaatgacgagaagaaagccaagggcgctgatggcaaaaccggggcgaagatcgccacacctcggggagcagcctctccggcccagaagggcacgtccaacgccaccaggatcccggccaagaccacgcccagccctaagactcctccagggtcaggtgaaccaccaaaatccggagaacgaagcggctacagcagccccggctctcccggaacgcctggcagtcgctcgcgcaccccatccctaccaacaccgcccacccgggagcccaagaaggtggcagtggtccgcactccccctaagtcaccatcagctagtaagagccgcctgcagactgcccctgtgcccatgccagacctaaagaatgtcaggtcgaagattggctctactgagaacctgaagcaccagccaggaggtggcaaggtgcagataattaataagaagctggatcttagcaacgtccagtccaagtgtggctcgaaggataatatcaaacacgtcccgggtggaggcagtgtgcaaatagtctacaagccggtggacctgagcaaagtgacctccaagtgtggctcgttagggaacatccatcacaagccaggaggtggccaggtggaagtaaaatcagagaagctggacttcaaggacagagtccagtcgaagattggctccttggataatatcacccacgtccctggaggagggaataagaagattgaaacccacaagctgaccttcagggagaatgccaaagccaagacagaccatggagcagaaattgtgtataagtcacccgtggtgtctggggacacatctccacggcacctcagcaatgtgtcttccacgggcagcatcgacatggtggactcaccacagcttgccacactagccgatgaagtgtctgcttccttggccaagcagggtttgtgatcaggctcccagggcagtcaataatcatggagagaagagagagtgagagtgtggaaaaaaaaaaaaaaaaagaatgatctggccccttgccctctgccctccccgctgctcctcatagacaggctgacctgcttgtcacctaacctgcttttgtggctcggatttggctcgggacttcaaaatcagtgatgggaaaagtacatttcatctttccaaattgatttgtgggctaaaaataaaacatatttaagggaaaaaaaaacatgtaaaaacatggccaaaaaatttccttgggcaattgctaattgatttcccccccctgaccccgccctccctctctgagtattagagggtgaagaaggctctggaggctgcttctggggagtggctgagggactagggcagctaattgcccatagccccatcctaggggcttcagggacagtggcagcaatgagagatttgagacttggtgtgttcgtggggccgtaggcaggtgctgttaacttgtgtgggtgtgagtggggactgaaacagcgacagcgaaggctgagagatggatgggtggactgagttagaggacagaggtgaggaaggcaggttgggagaggggacactggctccttgccaagtagcttggggaggacagggtgctgcagctgcctgcagcagtcctagctagctcagatgcctgcttgataaagcactgtgggggtaacgtgggtgtgtgtgccccttctgcagggcagcctgtgggagaaggggtattgggcagaaggaaggtaagccagcaggtggtaccttgtagattggttctcttgaaggctgctcttgacatcccagggcactggcttcttcctccctccccgcaaggtgggaggtcctgagcgaggtgtttcccttcgctcccacaggaaaagctgctttactgagttctcaagtttggaactacagccatgatttggccaccattacagacctgggactttagggctaaccagatctttgtaaggacttgtgcctcttgggggacctctgcctgttctcatgcttggccctctggcacttctgtagtgggagggatggggggtggtattctgggatgtgggtcccaggcctcccatccctcacacagccactgtatcccctctctctgtcctatcatgcccacgtctgccacgagagctagtcactgccgtccgtacatcacgtctcactgtcctgagtgccatgcctctcccagcccccatccctggcccctgggtagatatgggcaatatctgctctacactaggggttggagtccagggaaggcaaagatttgggcctcagtctctagtcctacgttccacgaatccaaccagtgtgcctcccacaaggaaccttacgaccttgtttggttcactccattacttcctatcctggatgggaactggtgtgtgcctgcctggggatgaccttggacctctgccttttcttttatctaagtggatgcctcctaggcctgactccttgtgttgagctggaggcagccaagtcaggtgccaatgtcttggcatcagtaagaacagtcaagagtcccagggcagggccacacttctcccatctttcgcttccaccccagcttgtgatcgctagcctcccagagctcagctgccattaagtccccatgcacgtaatcagtctccacaccccagtttggggaacatacccccttgattgaagtgtttttttcctccggtcccatggaaaccatgctgcctgccctgctggagcagacggccacctccatagatgcagccctttctttcccgtcttcgccctgttacgttgtagttggatttgtctgtttgtctgggttcaccagagtgactatgatagtgaaaagaaaagaaagaaaaagaaaaaaaaaaaaaaaaagaaaaagaaaaaggaaaaaaaaaaggacgcatgtatcttgaaatatttgtcaaaaggttctagcccaccacgtgatggagagtctggatatctccttcctgacgtggctccaggccagtgcagtgctaacctgctgggacatcccatgttttgaagggtttcttctgcatctgggacctcacagacactggattgtgacattggaggtctgtgacattggaggtcaatggcattggccaaggcctgaagcacaggaccagctagaggcagcaggctccgagtgccagggagagcttgtggctggcctgttttgtatgaagatggtcctttctgatcacgacttcaaatcccacagtagccctgaaagacatctaagaactcctgcatcacaagagaaaaggacaccagtaccagcagggagagctgtgaccctagaaattccatgacgacccagtagatatccttgggccctctccaagcctgggccttttcaccatagagtttgggatggactgtcccactgatgaaggggacatcttaggagactcccttggtttccaagctgtcagccccctgaacttgcacgacctcctacagcttcagggactaggcctttgaagattaggaacctcaggcccacatcagccacttctgatgtacagttaaggacaatgtggagactaggaggaagcagccagcctttcccattaaagaactcttgagtgcccagggctacctattgtgagcttccccactgataagactttagctgtccatagaagtgagtccgagggaggaaaagtgtggtttcttcatcatggttacctgtcgtggttctctctcttacacccatttacccatcccgcagttcctgtccttgaatggggggtggggtgctctgcctatctcttgtggggtgatcagcccaaaaatcatgatttggagtgatctgatcagtgctgataggcagtttacaaagggattctggcttgtgacttcagtgaggacaatcccccagggccctttctttccatgcctctccaactcagagccaatgtctttgggtgggctagatagatagggcatacaattggcctggttcctccaagctcttaattcactttatcaatagttccatttaaattgacttcaatgataagagtgtatcccatttgagattgcttgcgttgtgggggagggggaggaggaacacattaagataattcacatgggcaaagggaggtcttggagtgtagccgttaagccatcttgtaaccccattcatgattttgaccacctgctagagagaagaggtgccaagagactagaacttggaggcttggctgtcccactaataggctttcgcaaggcagaggtagccagctaggtccctgccttcccagccaggtacagctctcaggtttgtggaggtaatctgtgaacttctcttcctgctgccttcttgtgatgtccagagcccacagtcaaatacctcctaagaaccctggcttccttccctctaatccactggcacatgactatcacctctggattgacctcagatccatagcctacacactgctagcagtggccaagatcacttcctttatctccatctgttctgttctccaggaaagtaagtggggatgagggtggaggtggtaatcaactgtagatctgtggctttatgagccttcagacttctctctggcttcttctggaagggttactattggcagtattgcaatctcaccctcctgatgaactgtagcctgtgccgttactgtgctgggcatgatctccagtgcttgcaagtcccatgatttctttggtgattttgagggtggggggagggacacaaatcagcttagcttagcttcctgtctgtgaatgtccatatagtgtattgtgttttaacaaatgatctacactgactgttgctgtaaaagtgaatttggaaataaagttattactctgaataaaaaaaaaaaaaaaaaa

SEQ ID NO: 6 - DNA, 5396 bp, Mus musculus
ttttttttttttttttttattcagagtaataactttatttccaaattcacttttacagcaacagtcagtgtagatcatttgttaaaacacaatacactatatggacattcacagacaggaagctaagctaagctgatttgtgtccctccccccaccctcaaaatcaccaaagaaatcatgggacttgcaagcactggagatcatgcccagcacagtaacggcacaggctacagttcatcaggagggtgagattgcaatactgccaatagtaacccttccagaagaagccagagagaagtctgaaggctcataaagccacagatctacagttgattaccacctccaccctcatccccacttactttcctggagaacagaacagatggagataaaggaagtgatcttggccactgctagcagtgtgtaggctatggatctgaggtcaatccagaggtgatagtcatgtgccagtggattagagggaaggaagccagggttcttaggaggtatttgactgtgggctctggacatcacaagaaggcagcaggaagagaagttcacagattacctccacaaacctgagagctgtacctggctgggaaggcagggacctagctggctacctctgccttgcgaaagcctattagtgggacagccaagcctccaagttctagtctcttggcacctcttctctctagcaggtggtcaaaatcatgaatggggttacaagatggcttaacggctacactccaagacctccctttgcccatgtgaattatcttaatgtgttcctcctccccctcccccacaacgcaagcaatctcaaatgggatacactcttatcattgaagtcaatttaaatggaactattgataaagtgaattaagagcttggaggaaccaggccaattgtatgccctatctatctagcccacccaaagacattggctctgagttggagaggcatggaaagaaagggccctgggggattgtcctcactgaagtcacaagccagaatccctttgtaaactgcctatcagcactgatcagatcactccaaatcatgatttttgggctgatcaccccacaagagataggcagagcaccccaccccccattcaaggacaggaactgcgggatgggtaaatgggtgtaagagagagaaccacgacaggtaaccatgatgaagaaaccacacttttcctccctcggactcacttctatggacagctaaagtcttatcagtggggaagctcacaataggtagccctgggcactcaagagttctttaatgggaaaggctggctgcttcctcctagtctccacattgtccttaactgtacatcagaagtggctgatgtgggcctgaggttcctaatcttcaaaggcctagtccctgaagctgtaggaggtcgtgcaagttcagggggctgacagcttggaaaccaagggagtctcctaagatgtccccttcatcagtgggacagtccatcccaaactctatggtgaaaaggcccaggcttggagagggcccaaggatatctactgggtcgtcatggaatttctagggtcacagctctccctgctggtactggtgtccttttctcttgtgatgcaggagttcttagatgtctttcagggctactgtgggatttgaagtcgtgatcagaaaggaccatcttcatacaaaacaggccagccacaagctctccctggcactcggagcctgctgcctctagctggtcctgtgcttcaggccttggccaatgccattgacctccaatgtcacagacctccaatgtcacaatccagtgtctgtgaggtcccagatgcagaagaaacccttcaaaacatgggatgtcccagcaggttagcactgcactggcctggagccacgtcaggaaggagatatccagactctccatcacgtggtgggctagaaccttttgacaaatatttcaagatacatgcgtccttttttttttcctttttctttttctttttttttttttttttctttttctttcttttcttttcactatcatagtcactctggtgaacccagacaaacagacaaatccaactacaacgtaacagggcgaagacgggaaagaaagggctgcatctatggaggtggccgtctgctccagcagggcaggcagcatggtttccatgggaccggaggaaaaaaacacttcaatcaagggggtatgttccccaaactggggtgtggagactgattacgtgcatggggacttaatggcagctgagctctgggaggctagcgatcacaagctggggtggaagcgaaagatgggagaagtgtggccctgccctgggactcttgactgttcttactgatgccaagacattggcacctgacttggctgcctccagctcaacacaaggagtcaggcctaggaggcatccacttagataaaagaaaaggcagaggtccaaggtcatccccaggcaggcacacaccagttcccatccaggataggaagtaatggagtgaaccaaacaaggtcgtaaggttccttgtgggaggcacactggttggattcgtggaacgtaggactagagactgaggcccaaatctttgccttccctggactccaacccctagtgtagagcagatattgcccatatctacccaggggccagggatgggggctgggagaggcatggcactcaggacagtgagacgtgatgtacggacggcagtgactagctctcgtggcagacgtgggcatgataggacagagagaggggatacagtggctgtgtgagggatgggaggcctgggacccacatcccagaataccaccccccatccctcccactacagaagtgccagagggccaagcatgagaacaggcagaggtcccccaagaggcacaagtccttacaaagatctggttagccctaaagtcccaggtctgtaatggtggccaaatcatggctgtagttccaaacttgagaactcagtaaagcagcttttcctgtgggagcgaagggaaacacctcgctcaggacctcccaccttgcggggagggaggaagaagccagtgccctgggatgtcaagagcagccttcaagagaaccaatctacaaggtaccacctgctggcttaccttccttctgcccaataccccttctcccacaggctgccctgcagaaggggcacacacacccacgttacccccacagtgctttatcaagcaggcatctgagctagctaggactgctgcaggcagctgcagcaccctgtcctccccaagctacttggcaaggagccagtgtcccctctcccaacctgccttcctcacctctgtcctctaactcagtccacccatccatctctcagccttcgctgtcgctgtttcagtccccactcacacccacacaagttaacagcacctgcctacggccccacgaacacaccaagtctcaaatctctcattgctgccactgtccctgaagcccctaggatggggctatgggcaattagctgccctagtccctcagccactccccagaagcagcctccagagccttcttcaccctctaatactcagagagggagggcggggtcaggggggggaaatcaattagcaattgcccaaggaaattttttggccatgtttttacatgtttttttttcccttaaatatgttttatttttagcccacaaatcaatttggaaagatgaaatgtacttttcccatcactgattttgaagtcccgagccaaatccgagccacaaaagcaggttaggtgacaagcaggtcagcctgtctatgaggagcagcggggagggcagagggcaaggggccagatcattctttttttttttttttttccacactctcactctctcttctctccatgattattgactgccctgggagcctgatcacaaaccctgcttggccaaggaagcagacacttcatcggctagtgtggcaagctgtggtgagtccaccatgtcgatgctgcccgtggaagacacattgctgaggtgccgtggagatgtgtccccagacaccacgggtgacttatacacaatttctgctccatggtctgtcttggctttggcattctccctgaaggtcagcttgtgggtttcaatcttcttattccctcctccagggacgtgggtgatattatccaaggagccaatcttcgactggactctgtccttgaagtccagcttctctgattttacttccacctggccacctcctggcttgtgatggatgttccctaacgagccacacttggaggtcactttgctcaggtccaccggcttgtagactatttgcacactgcctccacccgggacgtgtttgatattatccttcgagccacacttggactggacgttgctaagatccagcttcttattaattatctgcaccttgccacctcctggctggtgcttcaggttctcagtagagccaatcttcgacctgacattctttaggtctggcatgggcacaggggcagtctgcaggcggctcttactagctgatggtgacttagggggagtgcggaccactgccaccttcttgggctcccgggtgggcggtgttggtagggatggggtgcgcgagcgactgccaggcgttccgggagagccggggctgctgtagccgcttcgttctccggattttggtggttcacctgaccctggaggagtcttagggctgggcgtggtcttggccgggatcctggtggcgttggacgtgcccttctgggccggagaggctgctccccgaggtgtggcgatcttcgccccggttttgccatcagcgcccttggctttcttctcgtcatttcctgtcctgtctttgctggccacacgagcttgagtcacatgcccagcggcttggtcctcctggttcggggtgtctccgatgcctgcttcttcggctgtaattccttctgggatctccgtgtggggctgggcagcggcctgcttgtcgggagctctctcatccactaggggcgcagtcacgtcttcagcagttggagtgctcttagcatcggaggtctccgaccctggttcctccgctccatcatcggcggggggctgtgggggagactcttttaagccatggtccatgtctccttcttggtcttggagcagagtgtaatctccagcatggtcttccattgtgtcaaactcctggcgagggtcagccatactggttcaaagcctgataatcgacagaaggcgaggacagaagaggacagcggaggagaaggtggttgtggcggcggcggcagaaggtgggcggtggcggcggcgctgctgctggtgctggagctggtgggtggcggagactgagagcgcgcgcggccgagaaagcgcgttctggaggccggcgg

SEQ ID NO: 7 - DNA, 5790 bp, Macaca fascicularis
gccgagcggcagggcgctcgcgcgcgcccactggtggccggaggagaaggctcccgcggaggccgggctgcccgccccctcccctggggaggctcgcgctcccgctgctcgcgcctgcgccgcctgccggcctcgggaacgcgccctcttccccggcgcgcgccctcgcagtcaccgccacccaccagctccggcaccaacagcagcgccgctgccaccgcccaccttctgccgccgccaccacagccaccttctcctcctccgctgtcctctcccgtcctcgcctctgtcgactatcaggcgagccttgaaccaggatggctgagccccgccaggagttcgatgtgatggaagatcacgctgggacgtacgggttgggggacaggaaagatcaagagggctacaccatgctccaagaccaagagggtgacacggacgctggcctgaaagaatctcccctgcagacccccgctgaggatggatctgaggaactgggctctgaaacctctgatgctaagagcactccaacggcggaagatgtgacagcgcccttagtggatgagagagctcccggcgagcaggctgccgcccagccccacatggagatcccagaaggaaccacagctgaggaagcaggcatcggagacacccccagcctggaagacgaagctgctggtcacgtgacccaagctcgcatggtcagtaaaagcaaagacgggactggaagcgatgacaaaaaagccaagggggctgatgggaaaacgaagatcgccacaccccggggagcggcccctccaggccagaagggccaagccaacgccaccaggattccagcaaaaaccccgcccgccccaaagacaccacccagctctggtgaacctccaaaatcaggggatcgcagtggctacagcagccccggctccccgggcactcccggcagccgctcccgcaccccgtcccttccaacccctccagcccgggagcccaagaaggtggcggtggtccgtactccacctaagtcgccgtcttccgccaagagccgcctgcagacagcccccgtgcccatgccagacctgaagaacgtcaagtccaagatcggctccaccgagaacctgaagcaccagccgggaggcgggaaggtgcagataattaataagaagctggatcttagcaacgtccagtccaagtgtggctcaaaggataatatcaaacacgtcccgggaggcggcagtgtgcaaatagtctacaaaccagttgacctgagcaaggtgacctccaagtgtggctcattaggcaacatccatcataaaccaggaggtggccaggtggaagtaaaatctgagaagctggacttcaaggacagagtgcagtcgaagatcgggtccctggacaatatcacccatgtccctggcggaggaaataaaaagattgaaacccacaagctgaccttccgcgagaacgccaaagccaagacagaccacggggcggaaatcgtgtacaagtcgccggtggtgtctggggacacgtctccacggcacctcagcaatgtctcctccaccggcagcatcgacatggtagactcgccccagctcgccacgctagccgacgaggtgtctgcctccctggccaagcagggtttgtgatcaggcccccggggcggtcaataatcgtggagagaagagagagtgagagtgtggaaaaaaaaagaataatgacccggccccgccctctgcccccagctgctcctcgcagttcggttaatcggttcatcacttaaccggcttttatcgctcggctttggctcgggacttcaaaatcagtgatgggaataagagcaaattgcatctttccaaattgatcggtgggctaataataaaatattttttaaaaaacattcaaaaacatggccacacccaacatttcctcgggcaattccttttgattctttttttttccccctccatgtagaagagggagaaggagaggctgtgaaagctgcttcggggggatttcaagagactgggggtgcccaccgcctctggccctgtcgtgggggtgtcacagaggcagcggcagcaacaaaggatttgaaacttggtgtgttcgtggagccacaggcagacgatgtcaaccttgtgtgagtgtgacgggtgggggtggggcgggaggccatgggggaggccaaggcaggggctgggcagaggggagaggaaggacgagaagggggagtgggagaggaagccacatgctggagaggagatgccctcctccgcgccactgggagggccaaggcctccgccacctgcagtgtctcagactgagcggctgcctgtccttggtggccagggtctgctgcgagttgatgtgccaccctctgcagggcagcctgtgggagaaggggcggcgggtaagaagagaaggcaagctggcgggagggtggcaccccgtggatgacctccttggaaaagactgaccttgatgtcggagggcgctggcctcttcctccctccctgcagggtagggggcctgagccgaggggcttccctctgctccacagaaaccctgttttattgagttctgaaggttggaactgcagccatgattttggccactttgcagacctgggactttagggctaaccagttctctttgtaaggacttgtgcctcttgggagacgtccacccgtttccaagcctgggccaccggcatctctggagtgtgcaggggtctgggaggcgggtcccgagccccctgtccttcccacggccactgcagtcacccctgtctgccccactgtgctgtcgtctgccatgagaacccagtcactgcctatacccctcatcacgtcacaatgtccaaattcccagcctcaccaccccccttctcagtaaggaccctggttggctgtgggaggcacctactccatactgagggtgaaattaagggaaggtaaagtccaggcacaagagtgggaccccagcctctcactctcagttccactcatccaactgggtccctcaccacgaatctcacgacctgattcggttccctgcctcctcctcccatcacagatgtgagccagggcactgctcagctgtgaccctcggtgtttctgccttgttgacatagagagagccctttccccccgagaaggcctggccccttcctgtgctgagcccgcagcaggaggctgggtgtcctggttgtcggtgacggcaccaggatgggcgggcaaggcacccagggcaggcccacagtcccgctgtcccccacttgcaccccagcttgtggctgccagcctcccagacagcccagcccgctgctcagctccacatgcatagaatcagccctccacatcccaaaaaggggaacacacccccttcgaaatggttttctccccggtcccagctggaagccatgctgtctgttctgctggagcagctgaacatatacatagatgttgccctgccctccccatctgcaccctgttgcgttgtagttggatttgtctgtttatgcttggattcaccagagtgactatgatagtgaaaagaaaaaaaaaaaaaaaaaaaggacgcatgtatcttgaaatgcttgtaaagaggtttctaacccaccctcacaaggtgtctctcacccccacgctgggacgcgtgtggcctgtgtggcgccgccctgctggggcctcccaaggtttgaaaggctttcctcagcatccgggacccaacagagaccagattctagcatctaaggaggccgttcagctgtgaagaaggcctgaagcacaggattaggactgaagcgatgacatctccttccctacttccccttggggctctctgtgtcagggcagagagtaggtcttgtggctggtctggcttgcggcacgaggatggttctctctggtcacagcccgaagtcccacagcagtcctaaaggaggcttacaactcctgcatcacaagaagaaggaagccagtgccagctggggggatctgcagctcccagaagctccatgagcctcagccaccccgcagactgggttcctcgccaagctcgccctctggaggggcagccagcctcccaccaagggccctgcgaccacagcagggattgggatgaatggcctatcctggatctgctccagaggcccgagccacctgcctgaggaaggataagtcaggagacaccgttcccaaagccttgaccagagcacctcagcccactgaccttgcacaaactccatctgctgccatgagaaaagggaagccgcctttgcaaaaaattgctgcctaaagaaactcagcagcctcaggctcaattctgccgcttctggtttgggtacagttaaaggcaaccctgagggacttggcagtagaaatccagggcatcccctagggctggcaacttcgtgtgcagctagagctttccctgcaagaagtttctgggcccagaactctccaccaggaagctccctgctgttcgctaagtcccagcaattctctaagtgaagggatctgagaatgaggaggaaatgtggggtagagatttggtggtggttagagacatgcccccctcattactgccaacagtttcggctgcatttttcacgtacctcggttcctcttcctgaagttcttgtgccctgctcttcagcaccgtgggccttatccggtaggctctgggatctcccccttgtggggcaggctcttggggccagcctaagatcatggtttagggtgatcagtgctggcagataaattgcaaaggcacgctggcttgtgacctcaaatgacaatccccccagggctgggcactcctcccctcccctcacttctcccacctgcagagccagtgtccgtgggtgggctagataggatatactgtatgccggctccttcaagctgttgactcactttatcaatagttccatttaaattgacttcaatggtgagactgtatcctgtttgctattgcttattgtgctatggggggaggggggaggaatgtgtaacatagttaacatgggtaaagggagatcttggggtgcagcacttcaattgcctcgtaacccttttcatcatttcaaccacatttgctaaagggagggagcagccacgcggttagaggcccttggggtttctcttttccactgacagcctttcccaggcagctggccagttccccattccctccccagccaggtgcaggcgtagcaatatggacatctggttgctttggcctgctgccctctttcaggggtcctaagcccacaatcatgcctccctaagaccctggcatccttccttttaagccgttggcacctctgtgccacctctcacactggctccagacacagcctgtgcttctggcagctgagatcactcacttccccctcctcatctttgttggagctccaagtcaagccacgaggtcagggcgagggcagaggtggtcaccagcgtgtcccatctacagacctgtggcttcgtaagacttctgatttctcttcagctttgaaaagggttaccctgggcactggcctagagtctcacctcctaatagacttacccccatgagtttgccatgttgagcaggacaatttctggcacttgcaagtcccatgatttcttcggtaattgtgagggtggggggagggacatgaaatcatcttagcttagcttcctgtctgtgaatgtctatatagtgtattgtgtgttttaacaaatgatttacactgactgttgccgtaaaagtgaatttggaaataaagttattactctgattaaa

SEQ ID NO: 8 - DNA, 5790 bp, Macaca fascicularis
tttaatcagagtaataactttatttccaaattcacttttacggcaacagtcagtgtaaatcatttgttaaaacacacaatacactatatagacattcacagacaggaagctaagctaagatgatttcatgtccctccccccaccctcacaattaccgaagaaatcatgggacttgcaagtgccagaaattgtcctgctcaacatggcaaactcatgggggtaagtctattaggaggtgagactctaggccagtgcccagggtaacccttttcaaagctgaagagaaatcagaagtcttacgaagccacaggtctgtagatgggacacgctggtgaccacctctgccctcgccctgacctcgtggcttgacttggagctccaacaaagatgaggagggggaagtgagtgatctcagctgccagaagcacaggctgtgtctggagccagtgtgagaggtggcacagaggtgccaacggcttaaaaggaaggatgccagggtcttagggaggcatgattgtgggcttaggacccctgaaagagggcagcaggccaaagcaaccagatgtccatattgctacgcctgcacctggctggggagggaatggggaactggccagctgcctgggaaaggctgtcagtggaaaagagaaaccccaagggcctctaaccgcgtggctgctccctccctttagcaaatgtggttgaaatgatgaaaagggttacgaggcaattgaagtgctgcaccccaagatctccctttacccatgttaactatgttacacattcctcccccctccccccatagcacaataagcaatagcaaacaggatacagtctcaccattgaagtcaatttaaatggaactattgataaagtgagtcaacagcttgaaggagccggcatacagtatatcctatctagcccacccacggacactggctctgcaggtgggagaagtgaggggaggggaggagtgcccagccctggggggattgtcatttgaggtcacaagccagcgtgcctttgcaatttatctgccagcactgatcaccctaaaccatgatcttaggctggccccaagagcctgccccacaagggggagatcccagagcctaccggataaggcccacggtgctgaagagcagggcacaagaacttcaggaagaggaaccgaggtacgtgaaaaatgcagccgaaactgttggcagtaatgaggggggcatgtctctaaccaccaccaaatctctaccccacatttcctcctcattctcagatcccttcacttagagaattgctgggacttagcgaacagcagggagcttcctggtggagagttctgggcccagaaacttcttgcagggaaagctctagctgcacacgaagttgccagccctaggggatgccctggatttctactgccaagtccctcagggttgcctttaactgtacccaaaccagaagcggcagaattgagcctgaggctgctgagtttctttaggcagcaattttttgcaaaggcggcttcccttttctcatggcagcagatggagtttgtgcaaggtcagtgggctgaggtgctctggtcaaggctttgggaacggtgtctcctgacttatccttcctcaggcaggtggctcgggcctctggagcagatccaggataggccattcatcccaatccctgctgtggtcgcagggcccttggtgggaggctggctgcccctccagagggcgagcttggcgaggaacccagtctgcggggtggctgaggctcatggagcttctgggagctgcagatccccccagctggcactggcttccttcttcttgtgatgcaggagttgtaagcctcctttaggactgctgtgggacttcgggctgtgaccagagagaaccatcctcgtgccgcaagccagaccagccacaagacctactctctgccctgacacagagagccccaaggggaagtagggaaggagatgtcatcgcttcagtcctaatcctgtgcttcaggccttcttcacagctgaacggcctccttagatgctagaatctggtctctgttgggtcccggatgctgaggaaagcctttcaaaccttgggaggccccagcagggcggcgccacacaggccacacgcgtcccagcgtgggggtgagagacaccttgtgagggtgggttagaaacctctttacaagcatttcaagatacatgcgtcctttttttttttttttttttcttttcactatcatagtcactctggtgaatccaagcataaacagacaaatccaactacaacgcaacagggtgcagatggggagggcagggcaacatctatgtatatgttcagctgctccagcagaacagacagcatggcttccagctgggaccggggagaaaaccatttcgaagggggtgtgttcccctttttgggatgtggagggctgattctatgcatgtggagctgagcagcgggctgggctgtctgggaggctggcagccacaagctggggtgcaagtgggggacagcgggactgtgggcctgccctgggtgccttgcccgcccatcctggtgccgtcaccgacaaccaggacacccagcctcctgctgcgggctcagcacaggaaggggccaggccttctcggggggaaagggctctctctatgtcaacaaggcagaaacaccgagggtcacagctgagcagtgccctggctcacatctgtgatgggaggaggaggcagggaaccgaatcaggtcgtgagattcgtggtgagggacccagttggatgagtggaactgagagtgagaggctggggtcccactcttgtgcctggactttaccttcccttaatttcaccctcagtatggagtaggtgcctcccacagccaaccagggtccttactgagaaggggggtggtgaggctgggaatttggacattgtgacgtgatgaggggtataggcagtgactgggttctcatggcagacgacagcacagtggggcagacaggggtgactgcagtggccgtgggaaggacagggggctcgggacccgcctcccagacccctgcacactccagagatgccggtggcccaggcttggaaacgggtggacgtctcccaagaggcacaagtccttacaaagagaactggttagccctaaagtcccaggtctgcaaagtggccaaaatcatggctgcagttccaaccttcagaactcaataaaacagggtttctgtggagcagagggaagcccctcggctcaggccccctaccctgcagggagggaggaagaggccagcgccctccgacatcaaggtcagtcttttccaaggaggtcatccacggggtgccaccctcccgccagcttgccttctcttcttacccgccgccccttctcccacaggctgccctgcagagggtggcacatcaactcgcagcagaccctggccaccaaggacaggcagccgctcagtctgagacactgcaggtggcggaggccttggccctcccagtggcgcggaggagggcatctcctctccagcatgtggcttcctctcccactcccccttctcgtccttcctctcccctctgcccagcccctgccttggcctcccccatggcctcccgccccacccccacccgtcacactcacacaaggttgacatcgtctgcctgtggctccacgaacacaccaagtttcaaatcctttgttgctgccgctgcctctgtgacacccccacgacagggccagaggcggtgggcacccccagtctcttgaaatccccccgaagcagctttcacagcctctccttctccctcttctacatggagggggaaaaaaaaagaatcaaaaggaattgcccgaggaaatgttgggtgtggccatgtttttgaatgttttttaaaaaatattttattattagcccaccgatcaatttggaaagatgcaatttgctcttattcccatcactgattttgaagtcccgagccaaagccgagcgataaaagccggttaagtgatgaaccgattaaccgaactgcgaggagcagctgggggcagagggcggggccgggtcattattctttttttttccacactctcactctctcttctctccacgattattgaccgccccgggggcctgatcacaaaccctgcttggccagggaggcagacacctcgtcggctagcgtggcgagctggggcgagtctaccatgtcgatgctgccggtggaggagacattgctgaggtgccgtggagacgtgtccccagacaccaccggcgacttgtacacgatttccgccccgtggtctgtcttggctttggcgttctcgcggaaggtcagcttgtgggtttcaatctttttatttcctccgccagggacatgggtgatattgtccagggacccgatcttcgactgcactctgtccttgaagtccagcttctcagattttacttccacctggccacctcctggtttatgatggatgttgcctaatgagccacacttggaggtcaccttgctcaggtcaactggtttgtagactatttgcacactgccgcctcccgggacgtgtttgatattatcctttgagccacacttggactggacgttgctaagatccagcttcttattaattatctgcaccttcccgcctcccggctggtgcttcaggttctcggtggagccgatcttggacttgacgttcttcaggtctggcatgggcacgggggctgtctgcaggcggctcttggcggaagacggcgacttaggtggagtacggaccaccgccaccttcttgggctcccgggctggaggggttggaagggacggggtgcgggagcggctgccgggagtgcccggggagccggggctgctgtagccactgcgatcccctgattttggaggttcaccagagctgggtggtgtctttggggcgggcggggtttttgctggaatcctggtggcgttggcttggcccttctggcctggaggggccgctccccggggtgtggcgatcttcgttttcccatcagcccccttggcttttttgtcatcgcttccagtcccgtctttgcttttactgaccatgcgagcttgggtcacgtgaccagcagcttcgtcttccaggctgggggtgtctccgatgcctgcttcctcagctgtggttccttctgggatctccatgtggggctgggcggcagcctgctcgccgggagctctctcatccactaagggcgctgtcacatcttccgccgttggagtgctcttagcatcagaggtttcagagcccagttcctcagatccatcctcagcgggggtctgcaggggagattctttcaggccagcgtccgtgtcaccctcttggtcttggagcatggtgtagccctcttgatctttcctgtcccccaacccgtacgtcccagcgtgatcttccatcacatcgaactcctggcggggctcagccatcctggttcaaggctcgcctgatagtcgacagaggcgaggacgggagaggacagcggaggaggagaaggtggctgtggtggcggcggcagaaggtgggcggtggcagcggcgctgctgttggtgccggagctggtgggtggcggtgactgcgagggcgcgcgccggggaagagggcgcgttcccgaggccggcaggcggcgcaggcgcgagcagcgggagcgcgagcctccccaggggagggggcgggcagcccggcctccgcgggagccttctcctccggccaccagtgggcgcgcgcgagcgccctgccgctcggc

SEQ ID NO: 9 - DNA, 5272 bp, Rattus norvegicus
accgcccaccttctgctgtcgccgccgccacaaccaccttcccctccgctgtcctcttctgtcctcgcctcctgtcgattatcaggctttgaagcagcatggctgaaccccgccaggagtttgacacaatggaagaccaggccggagattacactatgctccaagaccaagaaggagacatggaccatggcttaaaagagtctcccccacagcccccagccgatgatggatcagaagaaccagggtcggagacctctgatgctaagagcactccaactgctgaagacgtgactgcgcccctagtggaagagagagctcccgacaagcaggcgactgcccagtcccacacggagatcccagaaggcaccacagctgaagaagcaggcatcggagacaccccgaacatggaggaccaagctgctgggcatgtgactcaagctcgagtggccggcgtaagcaaagacaggacaggaaatgacgagaagaaagccaagggcgccgatggcaaaacgggggcgaagatcgccacacctcggggagcagccactccgggccagaaaggcacatccaatgccaccaggatcccagccaagaccacacccagcccaaagactcctccaggatcaggtgaaccaccaaaatccggagaacgaagcggctacagcagccccggctcgcccggaacccctggcagtcgctcccgtaccccatccctaccaacgccgcccacccgagagcccaaaaaggtggcagtggttcgcactccccctaagtcaccgtctgccagtaagagccgcctacagactgcccctgtgcccatgccagacctaaagaacgtcaggtccaagattggctccactgagaacctgaagcaccagccgggaggcggcaaggtgcagataattaataagaagctggatcttagcaacgtccagtccaagtgtggctcaaaggacaatatcaaacacgtcccgggcggaggcagtgtgcaaatagtctacaagccagtggacctgagcaaggtgacctccaagtgtggttccttagggaacatccatcacaagccaggaggtggccaggtagaagtaaaatcagagaagctggacttcaaggatagagtccagtcgaagattggctccttggataacatcacccatgtccctggaggagggaataagaagattgaaacccacaagctgaccttcagggagaatgccaaagccaagacagaccatggagcagaaatcgtgtacaagtcacctgtggtgtctggggacacatctccacggcacctcagcaacgtctcctccacgggcagcatcgacatggtggactctccacagcttgccacgttagccgatgaagtgtccgcctctttggccaagcagggtttgtgatcaggcccctggggccgtcactgatcatggagagaagagagagtgagagtgtggaaaaaaaaaaaaaaaaaagaatgacctggcccctcaccctctgccctccccgctgctcctcatagacaggctgaccagcttgtcacctaacctgcttttgtggctcgggtttggctcgggacttcaaaatcagtgatgggaaaaagtaaatttcatctttccaaattgatttgtgggctagtaataaaatatttttaaggaaggaaaaaaaaaaaaacacgtaaaaccatggccaaacaaaacccaacatttccttggcaattgttattgaccccgccccccccctctgagttttagagggtgaaggaggctttggatggaggctgcttctggggattggctgagggactagggcaactaattgcccacagccccatcttaggggcatcagggacagcggcagcaatgaaagacttgggacttggtgtgtttgtggagccgtaggcaggtgatgttaactttgtgtgggtttgagggaggactgtgatagtgaaggctgagagatgggtgggctgggagtcagaggagagaggtgaggaagacaggttgggagaggggacattggctccttgccaaggagcttgggaagcacaggtagccctggctgcctgcagcagtcttagctagcacagatgcctgcctgagaaagcacagtggggtacagtgggtgtgtgtgccccttctgaagggcagcccatgggagaaggggtattgggcagaaggaaggtaggccagaaggtggcaccttgtagattggttctctgaaggctgaccttgccatcccagggcactggctcccaccctccagggagggaggtcctgagctgaggagcttccctttgctctcacaggaaaacctgtgttactgagttctgaagtttggaactacagccatgattttggccaccatacagacctgggactttagggctaaccagttctttgtaaggacttgtgcctcttgcgggaacatctgcctgttctcaagcctggtcctctggcacttctgcagtgtgagggatgggggtggtaattctgggatgtgggtcccaggcctcccatcctcgcacagccactgtatcccctctacctgtcctatcatgcccacgtctgccatgagagccagtcactgccgtccgtacatcacgtctcaccgtcctgagtgcccagcctccccaagccccatccctggcccctgggtagttatggccaatatctgctctacactaggggttggagtccagggaaggcaaagatttgggccttggtctctagtcctacgttgcacgaatccaaccagtgtgcctcccacaaggaaccttacaaccttgtttggtttgctccatcatttcccatcgtggatgggagtccgtgtgtgcctggagattaccctggacacctctgcttttttttttttactttagcggttgcctcctaggcctgactccttcccatgttgaactggaggcagccacgttaggtgtcaatgtcctggcatcagtatgaacagtcagtagtcccagggcagggccacacttctcccatcttctgcttccaccccagcttgtgattgctagcctcccagagctcagccgccattaagtccccatgcacgtaatcagcccttcataccccaatttggggaacataccccttgattgaaatgttttccctccagtcctatggaagcggtgctgcctgccctgctggagcagccagccatctccagagacgcagccctttctctcctgtccgcaccctgttgcgctgtagtcggattcgtctgtttgtctgggttcaccagagtgactatgatagtgaaaagaaaaagaaaaagaaaaaagaaaaaagaaaaaaaaaaaaggacgcatgttatcttgaaatatttgtcaaaaggttgtagcccaccgcagggattggagggcctggatattccttgtcttcttcgtgacttaggtccaggccggtgcagtgctaccctgctgggacatcccatgttttgaagggtttcttcttcatctgggaccctgcagacactggattgtgacattggaggtctatgacattggccaaggcctgaagcacaggacccgttagaggcagcaggctccgactgtcagggagagcttgtggctggcctgtttctctgagtgaagatggtcctctctaatcacaacttcaagtcccacagcagccctggcagacatctaagaactcctgcatcacaagagaaaaggacactagtaccagcagggagagctgtggccctagaaattccatgactctccactacatatccgtgggtcctttccaagccttggcctcgtcaccaagggcttgggatggactgccccactgatgaaagggacatctttggagacccccttggtttccaaggcgtcagccccctgaccttgcatgacctcctacagctgtaaggatgaggcctttaaagattaggaacctcaggcccaggtcggccactttgggcttgggtacagttagggacgatgcggtagaaggaggtggccaacctttcccatataagagttctgtgtgcccagagctaccctattgtgagctccccactgctgatggactttagctgtccttagaagtgaagagtccaacggaggaaaaggaagtgtggtttgatggtctgtggtcccttcatcatggttacctgttgtggttttctctcgtatacccatttacccatcctgcagttcctgtccttgaataggggtgggggtactctgccatatctcttgtagggcagtcagcccccaagtcatagtttggagtgatctggtcagtgctaataggcagtttacaaaggaattctggcttgttacttcagtgaggacaatcccccaagggccctggcacctgtcctgtctttccatggctctccactgcagagccaatgtctttgggtgggctagatagggtgtacaatttgcctggttcctccaagctcttaatccactttatcaatagttccatttaaattgacttcaatgataagagtgtatcccatttgagattgcttgtgttgtggggtaaaggggggaggaggaacatgttaagataattgacatgggcaaggggaagtcttgaagtgtagcagttaaaccatcttgtagccccattcatgatgttgaccacttgctagagagaagaggtgccataaggctagaacctagaggcttggctgtcccaccaacaggcaggcttttgcaaggcagaggcagccagctaggtccctgacttcccagccaggtgcagctctaagaactgctcttgcctgctgccttcttgtggtgtccagagcccacagccaatgcctcctcaaaaccctggcttccttccttctaatccactggcacatcagcatcacctccggattgacttcagatccacagcctacactactagcagtgggtaagaccacttcctttgtccttgtctgttctccagaaaagtgggcatggaggcggtgttaataactataggtctgtggctttatgagccttcaaacttctctctagcttctgaaagggttacttttgggcagtattgcagtctcaccctcccgatgggctgtagcctgtgcagttgctgtactgggcatgatctccagtgcttgcaagtcccatgatttctttggtgattttgagggtggggggagggacatgaatcatcttagcttagcttcctgtctgtgaatgtccatatagtgtactgtgttttaacaaacgatttacactgactgttgctgtacaagtgaatttggaaataaagttattactctgattaaa

SEQ ID NO: 10 - DNA, 5272 bp, Rattus norvegicus
tttaatcagagtaataactttatttccaaattcacttgtacagcaacagtcagtgtaaatcgtttgttaaaacacagtacactatatggacattcacagacaggaagctaagctaagatgattcatgtccctccccccaccctcaaaatcaccaaagaaatcatgggacttgcaagcactggagatcatgcccagtacagcaactgcacaggctacagcccatcgggagggtgagactgcaatactgcccaaaagtaaccctttcagaagctagagagaagtttgaaggctcataaagccacagacctatagttattaacaccgcctccatgcccacttttctggagaacagacaaggacaaaggaagtggtcttacccactgctagtagtgtaggctgtggatctgaagtcaatccggaggtgatgctgatgtgccagtggattagaaggaaggaagccagggttttgaggaggcattggctgtgggctctggacaccacaagaaggcagcaggcaagagcagttcttagagctgcacctggctgggaagtcagggacctagctggctgcctctgccttgcaaaagcctgcctgttggtgggacagccaagcctctaggttctagccttatggcacctcttctctctagcaagtggtcaacatcatgaatggggctacaagatggtttaactgctacacttcaagacttccccttgcccatgtcaattatcttaacatgttcctcctcccccctttaccccacaacacaagcaatctcaaatgggatacactcttatcattgaagtcaatttaaatggaactattgataaagtggattaagagcttggaggaaccaggcaaattgtacaccctatctagcccacccaaagacattggctctgcagtggagagccatggaaagacaggacaggtgccagggcccttgggggattgtcctcactgaagtaacaagccagaattcctttgtaaactgcctattagcactgaccagatcactccaaactatgacttgggggctgactgccctacaagagatatggcagagtacccccacccctattcaaggacaggaactgcaggatgggtaaatgggtatacgagagaaaaccacaacaggtaaccatgatgaagggaccacagaccatcaaaccacacttccttttcctccgttggactcttcacttctaaggacagctaaagtccatcagcagtggggagctcacaatagggtagctctgggcacacagaactcttatatgggaaaggttggccacctccttctaccgcatcgtccctaactgtacccaagcccaaagtggccgacctgggcctgaggttcctaatctttaaaggcctcatccttacagctgtaggaggtcatgcaaggtcagggggctgacgccttggaaaccaagggggtctccaaagatgtccctttcatcagtggggcagtccatcccaagcccttggtgacgaggccaaggcttggaaaggacccacggatatgtagtggagagtcatggaatttctagggccacagctctccctgctggtactagtgtccttttctcttgtgatgcaggagttcttagatgtctgccagggctgctgtgggacttgaagttgtgattagagaggaccatcttcactcagagaaacaggccagccacaagctctccctgacagtcggagcctgctgcctctaacgggtcctgtgcttcaggccttggccaatgtcatagacctccaatgtcacaatccagtgtctgcagggtcccagatgaagaagaaacccttcaaaacatgggatgtcccagcagggtagcactgcaccggcctggacctaagtcacgaagaagacaaggaatatccaggccctccaatccctgcggtgggctacaaccttttgacaaatatttcaagataacatgcgtccttttttttttttcttttttcttttttctttttctttttcttttcactatcatagtcactctggtgaacccagacaaacagacgaatccgactacagcgcaacagggtgcggacaggagagaaagggctgcgtctctggagatggctggctgctccagcagggcaggcagcaccgcttccataggactggagggaaaacatttcaatcaaggggtatgttccccaaattggggtatgaagggctgattacgtgcatggggacttaatggcggctgagctctgggaggctagcaatcacaagctggggtggaagcagaagatgggagaagtgtggccctgccctgggactactgactgttcatactgatgccaggacattgacacctaacgtggctgcctccagttcaacatgggaaggagtcaggcctaggaggcaaccgctaaagtaaaaaaaaaaaagcagaggtgtccagggtaatctccaggcacacacggactcccatccacgatgggaaatgatggagcaaaccaaacaaggttgtaaggttccttgtgggaggcacactggttggattcgtgcaacgtaggactagagaccaaggcccaaatctttgccttccctggactccaacccctagtgtagagcagatattggccataactacccaggggccagggatggggcttggggaggctgggcactcaggacggtgagacgtgatgtacggacggcagtgactggctctcatggcagacgtgggcatgataggacaggtagaggggatacagtggctgtgcgaggatgggaggcctgggacccacatcccagaattaccacccccatccctcacactgcagaagtgccagaggaccaggcttgagaacaggcagatgttcccgcaagaggcacaagtccttacaaagaactggttagccctaaagtcccaggtctgtatggtggccaaaatcatggctgtagttccaaacttcagaactcagtaacacaggttttcctgtgagagcaaagggaagctcctcagctcaggacctccctccctggagggtgggagccagtgccctgggatggcaaggtcagccttcagagaaccaatctacaaggtgccaccttctggcctaccttccttctgcccaataccccttctcccatgggctgcccttcagaaggggcacacacacccactgtaccccactgtgctttctcaggcaggcatctgtgctagctaagactgctgcaggcagccagggctacctgtgcttcccaagctccttggcaaggagccaatgtcccctctcccaacctgtcttcctcacctctctcctctgactcccagcccacccatctctcagccttcactatcacagtcctccctcaaacccacacaaagttaacatcacctgcctacggctccacaaacacaccaagtcccaagtctttcattgctgccgctgtccctgatgcccctaagatggggctgtgggcaattagttgccctagtccctcagccaatccccagaagcagcctccatccaaagcctccttcaccctctaaaactcagagggggggggcggggtcaataacaattgccaaggaaatgttgggttttgtttggccatggttttacgtgtttttttttttttccttccttaaaaatattttattactagcccacaaatcaatttggaaagatgaaatttactttttcccatcactgattttgaagtcccgagccaaacccgagccacaaaagcaggttaggtgacaagctggtcagcctgtctatgaggagcagcggggagggcagagggtgaggggccaggtcattcttttttttttttttttttccacactctcactctctcttctctccatgatcagtgacggccccaggggcctgatcacaaaccctgcttggccaaagaggcggacacttcatcggctaacgtggcaagctgtggagagtccaccatgtcgatgctgcccgtggaggagacgttgctgaggtgccgtggagatgtgtccccagacaccacaggtgacttgtacacgatttctgctccatggtctgtcttggctttggcattctccctgaaggtcagcttgtgggtttcaatcttcttattccctcctccagggacatgggtgatgttatccaaggagccaatcttcgactggactctatccttgaagtccagcttctctgattttacttctacctggccacctcctggcttgtgatggatgttccctaaggaaccacacttggaggtcaccttgctcaggtccactggcttgtagactatttgcacactgcctccgcccgggacgtgtttgatattgtcctttgagccacacttggactggacgttgctaagatccagcttcttattaattatctgcaccttgccgcctcccggctggtgcttcaggttctcagtggagccaatcttggacctgacgttctttaggtctggcatgggcacaggggcagtctgtaggcggctcttactggcagacggtgacttagggggagtgcgaaccactgccacctttttgggctctcgggtgggcggcgttggtagggatggggtacgggagcgactgccaggggttccgggcgagccggggctgctgtagccgcttcgttctccggattttggtggttcacctgatcctggaggagtctttgggctgggtgtggtcttggctgggatcctggtggcattggatgtgcctttctggcccggagtggctgctccccgaggtgtggcgatcttcgcccccgttttgccatcggcgcccttggctttcttctcgtcatttcctgtcctgtctttgcttacgccggccactcgagcttgagtcacatgcccagcagcttggtcctccatgttcggggtgtctccgatgcctgcttcttcagctgtggtgccttctgggatctccgtgtgggactgggcagtcgcctgcttgtcgggagctctctcttccactaggggcgcagtcacgtcttcagcagttggagtgctcttagcatcagaggtctccgaccctggttcttctgatccatcatcggctgggggctgtgggggagactcttttaagccatggtccatgtctccttcttggtcttggagcatagtgtaatctccggcctggtcttccattgtgtcaaactcctggcggggttcagccatgctgcttcaaagcctgataatcgacaggaggcgaggacagaagaggacagcggaggggaaggtggttgtggcggcggcgacagcagaaggtgggcggt

SEQ ID NO: 11 - DNA, 1487 bp, Canis lupus familiaris
cgcgctcgcgctctcagccacccaccagctcccgcaccagcagcagcagcgccgccgccgccgccgccgccgccgccgcccaccttctgctgccgccaccacagccactttctcctctttcctctcctgtcctcgccctctgtcgactatcaggtgggccttgacctaggatggctgagccccgccaggagttcactgtgatggaagatcatgctgggacatacgggaaagatctcccctctcaggggggctacaccctgctgcaagaccatgagggggacgtggatcacggcctgaaagctgaagaagcaggcattggagacacccccaacctggaagaccaagctgctggacatgtgactcaagctcgcatggtcagtaaaggcaaagatgggactggaaccgatgacaaaaaagccaagggggctgatggtaaaactggaacgaagatcgccacaccccggggagcgaccccttcaggccagaaaggccaggccaatgccaccaggattccagcgaaaaccacgccctcccccaagaccccaccgggcggtgaatctggaaaatctggggatcgcagtggctacagcagccccggctccccaggcactcctggcagccgctcccgcaccccgtccctgccaaccccacccacccgggagcccaagaaggtggcggtggtccgcaccccacccaagtcgccgtctgcagccaagagtcgcctgcagaccgcccctgtgcccatgccagacctaaagaacgtcagatccaagatcggctccactgaaaacctgaagcaccagccaggaggtgggaaggtgcaaatagtgtacaaaccagtggatctgagcaaggtgacctccaagtgcggctcattaggcaacatccatcataagccaggaggcggtcaggtggaagtcaaatctgagaagctggacttcaaggacagagtccagtcgaagatcgggtccctggacaacatcacccacgtccctggcggagggaataaaaagatcgaaacccacaagctgaccttccgtgagaacgccaaagccaagaccgaccacggggcggagatcgtgtacaagtcgcccgtggtgtccggggacacgtctccgcggcacctgagcaacgtgtcctccacgggcagcatcgacatggtcgactcgccccagctcgccacgctagccgacgaagtgtccgcctccctggccaagcagggtttgtgatcaggcccccggggcggtcaatgatcgtggagagaagagagtgtggaaaaaaaaagaataatgatctggcccttctcgccctctgccctcccccagctgctcctcacagaccggttaatcggttaatcacttaacctgcttttgtcgctcggctctggctcgggacttcaaaatcagtgacgggaaaaagcaaatttcatctttccaaattgatgggtgggctaataataataaaatatttttaaaaccatttaaaaa

SEQ ID NO: 12 - DNA, 1487 bp, Canis lupus familiaris
tttttaaatggttttaaaaatattttattattattagcccacccatcaatttggaaagatgaaatttgctttttcccgtcactgattttgaagtcccgagccagagccgagcgacaaaagcaggttaagtgattaaccgattaaccggtctgtgaggagcagctgggggagggcagagggcgagaagggccagatcattattctttttttttccacactctcttctctccacgatcattgaccgccccgggggcctgatcacaaaccctgcttggccagggaggcggacacttcgtcggctagcgtggcgagctggggcgagtcgaccatgtcgatgctgcccgtggaggacacgttgctcaggtgccgcggagacgtgtccccggacaccacgggcgacttgtacacgatctccgccccgtggtcggtcttggctttggcgttctcacggaaggtcagcttgtgggtttcgatctttttattccctccgccagggacgtgggtgatgttgtccagggacccgatcttcgactggactctgtccttgaagtccagcttctcagatttgacttccacctgaccgcctcctggcttatgatggatgttgcctaatgagccgcacttggaggtcaccttgctcagatccactggtttgtacactatttgcaccttcccacctcctggctggtgcttcaggttttcagtggagccgatcttggatctgacgttctttaggtctggcatgggcacaggggcggtctgcaggcgactcttggctgcagacggcgacttgggtggggtgcggaccaccgccaccttcttgggctcccgggtgggtggggttggcagggacggggtgcgggagcggctgccaggagtgcctggggagccggggctgctgtagccactgcgatccccagattttccagattcaccgcccggtggggtcttgggggagggcgtggttttcgctggaatcctggtggcattggcctggcctttctggcctgaaggggtcgctccccggggtgtggcgatcttcgttccagttttaccatcagcccccttggcttttttgtcatcggttccagtcccatctttgcctttactgaccatgcgagcttgagtcacatgtccagcagcttggtcttccaggttgggggtgtctccaatgcctgcttcttcagctttcaggccgtgatccacgtccccctcatggtcttgcagcagggtgtagcccccctgagaggggagatctttcccgtatgtcccagcatgatcttccatcacagtgaactcctggcggggctcagccatcctaggtcaaggcccacctgatagtcgacagagggcgaggacaggagaggaaagaggagaaagtggctgtggtggcggcagcagaaggtgggcggcggcggcggcggcggcggcggcggcgctgctgctgctggtgcgggagctggtgggtggctgagagcgcgagcgcg

SEQ ID NO: 13 - RNA, 21 nt, Artificial Sequence
  Description of Artificial Sequence: Synthetic oligonucleotide
auagucuacaaaccaguugaa

SEQ ID NO: 14 - RNA, 21 nt, Artificial Sequence
  Description of Artificial Sequence: Synthetic oligonucleotide
gucuacaaaccaguugaccua

SEQ ID NO: 15 - RNA, 21 nt, Artificial Sequence
  Description of Artificial Sequence: Synthetic oligonucleotide
gcaaauagucuacaaaccaga

SEQ ID NO: 16 - RNA, 21 nt, Artificial Sequence
  Description of Artificial Sequence: Synthetic oligonucleotide
accaguugaccugagcaagga

SEQ ID NO: 17 - RNA, 21 nt, Artificial Sequence
  Description of Artificial Sequence: Synthetic oligonucleotide
aaccaguugaccugagcaaga

SEQ ID NO: 18 - RNA, 21 nt, Artificial Sequence
  Description of Artificial Sequence: Synthetic oligonucleotide
ugcaaauagucuacaaaccaa

SEQ ID NO: 19 - RNA, 21 nt, Artificial Sequence
  Description of Artificial Sequence: Synthetic oligonucleotide
agucuacaaaccaguugacca

SEQ ID NO: 20 - RNA, 21 nt, Artificial Sequence
  Description of Artificial Sequence: Synthetic oligonucleotide
agcaaggugaccuccaaguga

SEQ ID NO: 21 - RNA, 21 nt, Artificial Sequence
  Description of Artificial Sequence: Synthetic oligonucleotide
aauagucuacaaaccaguuga

SEQ ID NO: 22 - RNA, 21 nt, Artificial Sequence
  Description of Artificial Sequence: Synthetic oligonucleotide
ugaccugagcaaggugaccua

SEQ ID NO: 23 - RNA, 21 nt, Artificial Sequence
  Description of Artificial Sequence: Synthetic oligonucleotide
gcaaggugaccuccaagugua

SEQ ID NO: 24 - RNA, 21 nt, Artificial Sequence
  Description of Artificial Sequence: Synthetic oligonucleotide
uagucuacaaaccaguugaca

SEQ ID NO: 25 - RNA, 21 nt, Artificial Sequence
  Description of Artificial Sequence: Synthetic oligonucleotide
caaauagucuacaaaccagua

SEQ ID NO: 26 - RNA, 21 nt, Artificial Sequence
  Description of Artificial Sequence: Synthetic oligonucleotide
ucuacaaaccaguugaccuga

SEQ ID NO: 27 - RNA, 21 nt, Artificial Sequence
  Description of Artificial Sequence: Synthetic oligonucleotide
gaccugagcaaggugaccuca

SEQ ID NO: 28 - RNA, 21 nt, Artificial Sequence
  Description of Artificial Sequence: Synthetic oligonucleotide
caaggugaccuccaaguguga

SEQ ID NO: 29 - RNA, 21 nt, Artificial Sequence
  Description of Artificial Sequence: Synthetic oligonucleotide
ccaguugaccugagcaaggua

SEQ ID NO: 30 - RNA, 21 nt, Artificial Sequence
  Description of Artificial Sequence: Synthetic oligonucleotide
ggcaacauccaucauaaacca

SEQ ID NO: 31 - RNA, 21 nt, Artificial Sequence
  Description of Artificial Sequence: Synthetic oligonucleotide
aaauagucuacaaaccaguua

SEQ ID NO: 32 - RNA, 21 nt, Artificial Sequence
  Description of Artificial Sequence: Synthetic oligonucleotide
uacaaaccaguugaccugaga

SEQ ID NO: 33 - RNA, 21 nt, Artificial Sequence
  Description of Artificial Sequence: Synthetic oligonucleotide
guugaccugagcaaggugaca

SEQ ID NO: 34 - RNA, 21 nt, Artificial Sequence
  Description of Artificial Sequence: Synthetic oligonucleotide
cuacaaaccaguugaccugaa

SEQ ID NO: 35 - RNA, 21 nt, Artificial Sequence
  Description of Artificial Sequence: Synthetic oligonucleotide
gugugcaaauagucuacaaaa

SEQ ID NO: 36 - RNA, 21 nt, Artificial Sequence
  Description of Artificial Sequence: Synthetic oligonucleotide
gcucauuaggcaacauccaua

SEQ ID NO: 37 - RNA, 21 nt, Artificial Sequence
  Description of Artificial Sequence: Synthetic oligonucleotide
aaaccaguugaccugagcaaa

SEQ ID NO: 38 - RNA, 21 nt, Artificial Sequence
  Description of Artificial Sequence: Synthetic oligonucleotide
ccaaguguggcucauuaggca

SEQ ID NO: 39 - RNA, 21 nt, Artificial Sequence
  Description of Artificial Sequence: Synthetic oligonucleotide
ugugcaaauagucuacaaaca

SEQ ID NO: 40 - RNA, 21 nt, Artificial Sequence
  Description of Artificial Sequence: Synthetic oligonucleotide
aggcaacauccaucauaaaca

SEQ ID NO: 41 - RNA, 21 nt, Artificial Sequence
  Description of Artificial Sequence: Synthetic oligonucleotide
ccugagcaaggugaccuccaa

SEQ ID NO: 42 - RNA, 21 nt, Artificial Sequence
  Description of Artificial Sequence: Synthetic oligonucleotide
gaccuccaaguguggcucaua

SEQ ID NO: 43 - RNA, 21 nt, Artificial Sequence
  Description of Artificial Sequence: Synthetic oligonucleotide
uccaaguguggcucauuagga

SEQ ID NO: 44 - RNA, 21 nt, Artificial Sequence
  Description of Artificial Sequence: Synthetic oligonucleotide
auuaggcaacauccaucauaa

SEQ ID NO: 45 - RNA, 21 nt, Artificial Sequence
  Description of Artificial Sequence: Synthetic oligonucleotide
cugagcaaggugaccuccaaa

SEQ ID NO: 46 - RNA, 21 nt, Artificial Sequence
  Description of Artificial Sequence: Synthetic oligonucleotide
cauuaggcaacauccaucaua

SEQ ID NO: 47 - RNA, 21 nt, Artificial Sequence
  Description of Artificial Sequence: Synthetic oligonucleotide
ggcucauuaggcaacauccaa

SEQ ID NO: 48 - RNA, 21 nt, Artificial Sequence
  Description of Artificial Sequence: Synthetic oligonucleotide
agugugcaaauagucuacaaa

SEQ ID NO: 49 - RNA, 21 nt, Artificial Sequence
  Description of Artificial Sequence: Synthetic oligonucleotide
ucauuaggcaacauccaucaa

SEQ ID NO: 50 - RNA, 21 nt, Artificial Sequence
  Description of Artificial Sequence: Synthetic oligonucleotide
aguguggcucauuaggcaaca

SEQ ID NO: 51 - RNA, 21 nt, Artificial Sequence
  Description of Artificial Sequence: Synthetic oligonucleotide
ggugaccuccaaguguggcua

SEQ ID NO: 52 - RNA, 21 nt, Artificial Sequence
  Description of Artificial Sequence: Synthetic oligonucleotide
gagcaaggugaccuccaagua

SEQ ID NO: 53 - RNA, 21 nt, Artificial Sequence
  Description of Artificial Sequence: Synthetic oligonucleotide
acaaaccaguugaccugagca

SEQ ID NO: 54 - RNA, 21 nt, Artificial Sequence
  Description of Artificial Sequence: Synthetic oligonucleotide
accuccaaguguggcucauua

SEQ ID NO: 55 - RNA, 21 nt, Artificial Sequence
  Description of Artificial Sequence: Synthetic oligonucleotide
cagugugcaaauagucuacaa

SEQ ID NO: 56 - RNA, 21 nt, Artificial Sequence
  Description of Artificial Sequence: Synthetic oligonucleotide
aaguguggcucauuaggcaaa

SEQ ID NO: 57 - RNA, 21 nt, Artificial Sequence
  Description of Artificial Sequence: Synthetic oligonucleotide
uugaccugagcaaggugacca

SEQ ID NO: 58 - RNA, 21 nt, Artificial Sequence
  Description of Artificial Sequence: Synthetic oligonucleotide
caacauccaucauaaaccaga

SEQ ID NO: 59 - RNA, 21 nt, Artificial Sequence
  Description of Artificial Sequence: Synthetic oligonucleotide
gugcaaauagucuacaaacca

SEQ ID NO: 60 - RNA, 21 nt, Artificial Sequence
  Description of Artificial Sequence: Synthetic oligonucleotide
ugaccuccaaguguggcucaa

SEQ ID NO: 61 - RNA, 21 nt, Artificial Sequence
  Description of Artificial Sequence: Synthetic oligonucleotide
gcaacauccaucauaaaccaa

SEQ ID NO: 62 - RNA, 21 nt, Artificial Sequence
  Description of Artificial Sequence: Synthetic oligonucleotide
caaguguggcucauuaggcaa

SEQ ID NO: 63 - RNA, 21 nt, Artificial Sequence
  Description of Artificial Sequence: Synthetic oligonucleotide
gcagugugcaaauagucuaca

SEQ ID NO: 64 - RNA, 21 nt, Artificial Sequence
  Description of Artificial Sequence: Synthetic oligonucleotide
guggcucauuaggcaacauca

SEQ ID NO: 65 - RNA, 21 nt, Artificial Sequence
  Description of Artificial Sequence: Synthetic oligonucleotide
caaaccaguugaccugagcaa

SEQ ID NO: 66 - RNA, 21 nt, Artificial Sequence
  Description of Artificial Sequence: Synthetic oligonucleotide
ugagcaaggugaccuccaaga

SEQ ID NO: 67 - RNA, 21 nt, Artificial Sequence
  Description of Artificial Sequence: Synthetic oligonucleotide
aaggugaccuccaagugugga

SEQ ID NO: 68 - RNA, 21 nt, Artificial Sequence
  Description of Artificial Sequence: Synthetic oligonucleotide
cucauuaggcaacauccauca

SEQ ID NO: 69 - RNA, 21 nt, Artificial Sequence
  Description of Artificial Sequence: Synthetic oligonucleotide
gugaccuccaaguguggcuca

SEQ ID NO: 70 - RNA, 21 nt, Artificial Sequence
  Description of Artificial Sequence: Synthetic oligonucleotide
caguugaccugagcaagguga

SEQ ID NO: 71 - RNA, 21 nt, Artificial Sequence
  Description of Artificial Sequence: Synthetic oligonucleotide
aggugaccuccaaguguggca

SEQ ID NO: 72 - RNA, 21 nt, Artificial Sequence
  Description of Artificial Sequence: Synthetic oligonucleotide
uggcucauuaggcaacaucca

SEQ ID NO: 73 - RNA, 21 nt, Artificial Sequence
  Description of Artificial Sequence: Synthetic oligonucleotide
uuaggcaacauccaucauaaa

SEQ ID NO: 74 - RNA, 21 nt, Artificial Sequence
  Description of Artificial Sequence: Synthetic oligonucleotide
accugagcaaggugaccucca

SEQ ID NO: 75 - RNA, 21 nt, Artificial Sequence
  Description of Artificial Sequence: Synthetic oligonucleotide
ccuccaaguguggcucauuaa

SEQ ID NO: 76 - RNA, 21 nt, Artificial Sequence
  Description of Artificial Sequence: Synthetic oligonucleotide
aguugaccugagcaaggugaa

SEQ ID NO: 77 - RNA, 21 nt, Artificial Sequence
  Description of Artificial Sequence: Synthetic oligonucleotide
guguggcucauuaggcaacaa

SEQ ID NO: 78 - RNA, 21 nt, Artificial Sequence
  Description of Artificial Sequence: Synthetic oligonucleotide
aggcggcagugugcaaauaga

SEQ ID NO: 79 - RNA, 21 nt, Artificial Sequence
  Description of Artificial Sequence: Synthetic oligonucleotide
gcggcagugugcaaauaguca

SEQ ID NO: 80 - RNA, 21 nt, Artificial Sequence
  Description of Artificial Sequence: Synthetic oligonucleotide
uaggcaacauccaucauaaaa

SEQ ID NO: 81 - RNA, 21 nt, Artificial Sequence
  Description of Artificial Sequence: Synthetic oligonucleotide
uguggcucauuaggcaacaua

SEQ ID NO: 82 - RNA, 21 nt, Artificial Sequence
  Description of Artificial Sequence: Synthetic oligonucleotide
cuccaaguguggcucauuaga

SEQ ID NO: 83 - RNA, 21 nt, Artificial Sequence
  Description of Artificial Sequence: Synthetic oligonucleotide
ggcagugugcaaauagucuaa

SEQ ID NO: 84 - RNA, 21 nt, Artificial Sequence
  Description of Artificial Sequence: Synthetic oligonucleotide
cggcagugugcaaauagucua

SEQ ID NO: 85 - RNA, 21 nt, Artificial Sequence
  Description of Artificial Sequence: Synthetic oligonucleotide
ggcggcagugugcaaauagua

SEQ ID NO: 86 - RNA, 21 nt, Artificial Sequence
  Description of Artificial Sequence: Synthetic oligonucleotide
ggaggcggcagugugcaaaua

SEQ ID NO: 87 - RNA, 21 nt, Artificial Sequence
  Description of Artificial Sequence: Synthetic oligonucleotide
gaggcggcagugugcaaauaa

SEQ ID NO: 88 - RNA, 23 nt, Artificial Sequence
  Description of Artificial Sequence: Synthetic oligonucleotide
uucaacugguuuguagacuauuu

SEQ ID NO: 89 - RNA, 23 nt, Artificial Sequence
  Description of Artificial Sequence: Synthetic oligonucleotide
uaggucaacugguuuguagacua

SEQ ID NO: 90 - RNA, 23 nt, Artificial Sequence
  Description of Artificial Sequence: Synthetic oligonucleotide
ucugguuuguagacuauuugcac

SEQ ID NO: 91 - RNA, 23 nt, Artificial Sequence
  Description of Artificial Sequence: Synthetic oligonucleotide
uccuugcucaggucaacugguuu

SEQ ID NO: 92 - RNA, 23 nt, Artificial Sequence
  Description of Artificial Sequence: Synthetic oligonucleotide
ucuugcucaggucaacugguuug

SEQ ID NO: 93 - RNA, 23 nt, Artificial Sequence
  Description of Artificial Sequence: Synthetic oligonucleotide
uugguuuguagacuauuugcaca

SEQ ID NO: 94 - RNA, 23 nt, Artificial Sequence
  Description of Artificial Sequence: Synthetic oligonucleotide
uggucaacugguuuguagacuau

SEQ ID NO: 95 - RNA, 23 nt, Artificial Sequence
  Description of Artificial Sequence: Synthetic oligonucleotide
ucacuuggaggucaccuugcuca

SEQ ID NO: 96 - RNA, 23 nt, Artificial Sequence
  Description of Artificial Sequence: Synthetic oligonucleotide
ucaacugguuuguagacuauuug

SEQ ID NO: 97 - RNA, 23 nt, Artificial Sequence
  Description of Artificial Sequence: Synthetic oligonucleotide
uaggucaccuugcucaggucaac

SEQ ID NO: 98 - RNA, 23 nt, Artificial Sequence
  Description of Artificial Sequence: Synthetic oligonucleotide
uacacuuggaggucaccuugcuc

SEQ ID NO: 99 - RNA, 23 nt, Artificial Sequence
  Description of Artificial Sequence: Synthetic oligonucleotide
ugucaacugguuuguagacuauu

SEQ ID NO: 100 - RNA, 23 nt, Artificial Sequence
  Description of Artificial Sequence: Synthetic oligonucleotide
uacugguuuguagacuauuugca

SEQ ID NO: 101 - RNA, 23 nt, Artificial Sequence
  Description of Artificial Sequence: Synthetic oligonucleotide
ucaggucaacugguuuguagacu

SEQ ID NO: 102 - RNA, 23 nt, Artificial Sequence
  Description of Artificial Sequence: Synthetic oligonucleotide
ugaggucaccuugcucaggucaa

SEQ ID NO: 103 - RNA, 23 nt, Artificial Sequence
  Description of Artificial Sequence: Synthetic oligonucleotide
ucacacuuggaggucaccuugcu

SEQ ID NO: 104 - RNA, 23 nt, Artificial Sequence
  Description of Artificial Sequence: Synthetic oligonucleotide
uaccuugcucaggucaacugguu

SEQ ID NO: 105 - RNA, 23 nt, Artificial Sequence
  Description of Artificial Sequence: Synthetic oligonucleotide
ugguuuaugauggauguugccua

SEQ ID NO: 106 - RNA, 23 nt, Artificial Sequence
  Description of Artificial Sequence: Synthetic oligonucleotide
uaacugguuuguagacuauuugc

SEQ ID NO: 107 - RNA, 23 nt, Artificial Sequence
  Description of Artificial Sequence: Synthetic oligonucleotide
ucucaggucaacugguuuguaga

SEQ ID NO: 108 - RNA, 23 nt, Artificial Sequence
  Description of Artificial Sequence: Synthetic oligonucleotide
ugucaccuugcucaggucaacug

SEQ ID NO: 109 - RNA, 23 nt, Artificial Sequence
  Description of Artificial Sequence: Synthetic oligonucleotide
uucaggucaacugguuuguagac

SEQ ID NO: 110 - RNA, 23 nt, Artificial Sequence
  Description of Artificial Sequence: Synthetic oligonucleotide
uuuuguagacuauuugcacacug

SEQ ID NO: 111 - RNA, 23 nt, Artificial Sequence
  Description of Artificial Sequence: Synthetic oligonucleotide
uauggauguugccuaaugagcca

SEQ ID NO: 112 - RNA, 23 nt, Artificial Sequence
  Description of Artificial Sequence: Synthetic oligonucleotide
uuugcucaggucaacugguuugu

SEQ ID NO: 113 - RNA, 23 nt, Artificial Sequence
  Description of Artificial Sequence: Synthetic oligonucleotide
ugccuaaugagccacacuuggag

SEQ ID NO: 114 - RNA, 23 nt, Artificial Sequence
  Description of Artificial Sequence: Synthetic oligonucleotide
uguuuguagacuauuugcacacu

SEQ ID NO: 115 - RNA, 23 nt, Artificial Sequence
  Description of Artificial Sequence: Synthetic oligonucleotide
uguuuaugauggauguugccuaa

SEQ ID NO: 116 - RNA, 23 nt, Artificial Sequence
  Description of Artificial Sequence: Synthetic oligonucleotide
uuggaggucaccuugcucagguc

SEQ ID NO: 117 - RNA, 23 nt, Artificial Sequence
  Description of Artificial Sequence: Synthetic oligonucleotide
uaugagccacacuuggaggucac

SEQ ID NO: 118 - RNA, 23 nt, Artificial Sequence
  Description of Artificial Sequence: Synthetic oligonucleotide
uccuaaugagccacacuuggagg

SEQ ID NO: 119 - RNA, 23 nt, Artificial Sequence
  Description of Artificial Sequence: Synthetic oligonucleotide
uuaugauggauguugccuaauga

SEQ ID NO: 120 - RNA, 23 nt, Artificial Sequence
  Description of Artificial Sequence: Synthetic oligonucleotide
uuuggaggucaccuugcucaggu

SEQ ID NO: 121 - RNA, 23 nt, Artificial Sequence
  Description of Artificial Sequence: Synthetic oligonucleotide
uaugauggauguugccuaaugag

SEQ ID NO: 122 - RNA, 23 nt, Artificial Sequence
  Description of Artificial Sequence: Synthetic oligonucleotide
uuggauguugccuaaugagccac

SEQ ID NO: 123 - RNA, 23 nt, Artificial Sequence
  Description of Artificial Sequence: Synthetic oligonucleotide
uuuguagacuauuugcacacugc

SEQ ID NO: 124 - RNA, 23 nt, Artificial Sequence
  Description of Artificial Sequence: Synthetic oligonucleotide
uugauggauguugccuaaugagc

SEQ ID NO: 125 - RNA, 23 nt, Artificial Sequence
  Description of Artificial Sequence: Synthetic oligonucleotide
uguugccuaaugagccacacuug

SEQ ID NO: 126 - RNA, 23 nt, Artificial Sequence
  Description of Artificial Sequence: Synthetic oligonucleotide
uagccacacuuggaggucaccuu

SEQ ID NO: 127 - RNA, 23 nt, Artificial Sequence
  Description of Artificial Sequence: Synthetic oligonucleotide
uacuuggaggucaccuugcucag

SEQ ID NO: 128 - RNA, 23 nt, Artificial Sequence
  Description of Artificial Sequence: Synthetic oligonucleotide
ugcucaggucaacugguuuguag

SEQ ID NO: 129 - RNA, 23 nt, Artificial Sequence
  Description of Artificial Sequence: Synthetic oligonucleotide
uaaugagccacacuuggagguca

SEQ ID NO: 130 - RNA, 23 nt, Artificial Sequence
  Description of Artificial Sequence: Synthetic oligonucleotide
uuguagacuauuugcacacugcc

SEQ ID NO: 131 - RNA, 23 nt, Artificial Sequence
  Description of Artificial Sequence: Synthetic oligonucleotide
uuugccuaaugagccacacuugg

SEQ ID NO: 132 - RNA, 23 nt, Artificial Sequence
  Description of Artificial Sequence: Synthetic oligonucleotide
uggucaccuugcucaggucaacu

SEQ ID NO: 133 - RNA, 23 nt, Artificial Sequence
  Description of Artificial Sequence: Synthetic oligonucleotide
ucugguuuaugauggauguugcc

SEQ ID NO: 134 - RNA, 23 nt, Artificial Sequence
  Description of Artificial Sequence: Synthetic oligonucleotide
ugguuuguagacuauuugcacac

SEQ ID NO: 135 - RNA, 23 nt, Artificial Sequence
  Description of Artificial Sequence: Synthetic oligonucleotide
uugagccacacuuggaggucacc

SEQ ID NO: 136 - RNA, 23 nt, Artificial Sequence
  Description of Artificial Sequence: Synthetic oligonucleotide
uugguuuaugauggauguugccu

SEQ ID NO: 137 - RNA, 23 nt, Artificial Sequence
  Description of Artificial Sequence: Synthetic oligonucleotide
uugccuaaugagccacacuugga

SEQ ID NO: 138 - RNA, 23 nt, Artificial Sequence
  Description of Artificial Sequence: Synthetic oligonucleotide
uguagacuauuugcacacugccg

SEQ ID NO: 139 - RNA, 23 nt, Artificial Sequence
  Description of Artificial Sequence: Synthetic oligonucleotide
ugauguugccuaaugagccacac

SEQ ID NO: 140 - RNA, 23 nt, Artificial Sequence
  Description of Artificial Sequence: Synthetic oligonucleotide
uugcucaggucaacugguuugua

SEQ ID NO: 141 - RNA, 23 nt, Artificial Sequence
  Description of Artificial Sequence: Synthetic oligonucleotide
ucuuggaggucaccuugcucagg

SEQ ID NO: 142 - RNA, 23 nt, Artificial Sequence
  Description of Artificial Sequence: Synthetic oligonucleotide
uccacacuuggaggucaccuugc

SEQ ID NO: 143 - RNA, 23 nt, Artificial Sequence
  Description of Artificial Sequence: Synthetic oligonucleotide
ugauggauguugccuaaugagcc

SEQ ID NO: 144 - RNA, 23 nt, Artificial Sequence
  Description of Artificial Sequence: Synthetic oligonucleotide
ugagccacacuuggaggucaccu

SEQ ID NO: 145 - RNA, 23 nt, Artificial Sequence
  Description of Artificial Sequence: Synthetic oligonucleotide
ucaccuugcucaggucaacuggu

SEQ ID NO: 146 - RNA, 23 nt, Artificial Sequence
  Description of Artificial Sequence: Synthetic oligonucleotide
ugccacacuuggaggucaccuug

SEQ ID NO: 147 - RNA, 23 nt, Artificial Sequence
  Description of Artificial Sequence: Synthetic oligonucleotide
uggauguugccuaaugagccaca

SEQ ID NO: 148 - RNA, 23 nt, Artificial Sequence
  Description of Artificial Sequence: Synthetic oligonucleotide
uuuaugauggauguugccuaaug

SEQ ID NO: 149 - RNA, 23 nt, Artificial Sequence
  Description of Artificial Sequence: Synthetic oligonucleotide
uggaggucaccuugcucagguca

SEQ ID NO: 150 - RNA, 23 nt, Artificial Sequence
  Description of Artificial Sequence: Synthetic oligonucleotide
uuaaugagccacacuuggagguc

SEQ ID NO: 151 - RNA, 23 nt, Artificial Sequence
  Description of Artificial Sequence: Synthetic oligonucleotide
uucaccuugcucaggucaacugg

SEQ ID NO: 152 - RNA, 23 nt, Artificial Sequence
  Description of Artificial Sequence: Synthetic oligonucleotide
uuguugccuaaugagccacacuu

SEQ ID NO: 153 - RNA, 23 nt, Artificial Sequence
  Description of Artificial Sequence: Synthetic oligonucleotide
ucuauuugcacacugccgccucc

SEQ ID NO: 154 - RNA, 23 nt, Artificial Sequence
  Description of Artificial Sequence: Synthetic oligonucleotide
ugacuauuugcacacugccgccu

SEQ ID NO: 155 - RNA, 23 nt, Artificial Sequence
  Description of Artificial Sequence: Synthetic oligonucleotide
uuuuaugauggauguugccuaau

SEQ ID NO: 156 - RNA, 23 nt, Artificial Sequence
  Description of Artificial Sequence: Synthetic oligonucleotide
uauguugccuaaugagccacacu

SEQ ID NO: 157 - RNA, 23 nt, Artificial Sequence
  Description of Artificial Sequence: Synthetic oligonucleotide
ucuaaugagccacacuuggaggu

SEQ ID NO: 158 - RNA, 23 nt, Artificial Sequence
  Description of Artificial Sequence: Synthetic oligonucleotide
uuagacuauuugcacacugccgc

SEQ ID NO: 159 - RNA, 23 nt, Artificial Sequence
  Description of Artificial Sequence: Synthetic oligonucleotide
uagacuauuugcacacugccgcc

SEQ ID NO: 160 - RNA, 23 nt, Artificial Sequence
  Description of Artificial Sequence: Synthetic oligonucleotide
uacuauuugcacacugccgccuc

SEQ ID NO: 161 - RNA, 23 nt, Artificial Sequence
  Description of Artificial Sequence: Synthetic oligonucleotide
uauuugcacacugccgccucccg

SEQ ID NO: 162 - RNA, 23 nt, Artificial Sequence
  Description of Artificial Sequence: Synthetic oligonucleotide
uuauuugcacacugccgccuccc

SEQ ID NO: 163 - RNA, 21 nt, Artificial Sequence
  Description of Artificial Sequence: Synthetic oligonucleotide
auagucuacaaaccaguugaa

SEQ ID NO: 164 - RNA, 21 nt, Artificial Sequence
  Description of Artificial Sequence: Synthetic oligonucleotide
gucuacaaaccaguugaccua

SEQ ID NO: 165 - RNA, 21 nt, Artificial Sequence
  Description of Artificial Sequence: Synthetic oligonucleotide
gcaaauagucuacaaaccaga

SEQ ID NO: 166 - RNA, 21 nt, Artificial Sequence
  Description of Artificial Sequence: Synthetic oligonucleotide
accaguugaccugagcaagga

SEQ ID NO: 167 - RNA, 21 nt, Artificial Sequence
  Description of Artificial Sequence: Synthetic oligonucleotide
aaccaguugaccugagcaaga

SEQ ID NO: 168 - RNA, 21 nt, Artificial Sequence
  Description of Artificial Sequence: Synthetic oligonucleotide
ugcaaauagucuacaaaccaa

SEQ ID NO: 169 - RNA, 21 nt, Artificial Sequence
  Description of Artificial Sequence: Synthetic oligonucleotide
agucuacaaaccaguugacca

SEQ ID NO: 170 - RNA, 21 nt, Artificial Sequence
  Description of Artificial Sequence: Synthetic oligonucleotide
agcaaggugaccuccaaguga

SEQ ID NO: 171 - RNA, 21 nt, Artificial Sequence
  Description of Artificial Sequence: Synthetic oligonucleotide
aauagucuacaaaccaguuga

SEQ ID NO: 172 - RNA, 21 nt, Artificial Sequence
  Description of Artificial Sequence: Synthetic oligonucleotide
ugaccugagcaaggugaccua

SEQ ID NO: 173 - RNA, 21 nt, Artificial Sequence
  Description of Artificial Sequence: Synthetic oligonucleotide
gcaaggugaccuccaagugua

SEQ ID NO: 174 - RNA, 21 nt, Artificial Sequence
  Description of Artificial Sequence: Synthetic oligonucleotide
uagucuacaaaccaguugaca

SEQ ID NO: 175 - RNA, 21 nt, Artificial Sequence
  Description of Artificial Sequence: Synthetic oligonucleotide
caaauagucuacaaaccagua

SEQ ID NO: 176 - RNA, 21 nt, Artificial Sequence
  Description of Artificial Sequence: Synthetic oligonucleotide
ucuacaaaccaguugaccuga

SEQ ID NO: 177 - RNA, 21 nt, Artificial Sequence
  Description of Artificial Sequence: Synthetic oligonucleotide
gaccugagcaaggugaccuca

SEQ ID NO: 178 - RNA, 21 nt, Artificial Sequence
  Description of Artificial Sequence: Synthetic oligonucleotide
caaggugaccuccaaguguga

SEQ ID NO: 179 - RNA, 21 nt, Artificial Sequence
  Description of Artificial Sequence: Synthetic oligonucleotide
ccaguugaccugagcaaggua

SEQ ID NO: 180 - RNA, 21 nt, Artificial Sequence
  Description of Artificial Sequence: Synthetic oligonucleotide
ggcaacauccaucauaaacca

SEQ ID NO: 181 - RNA, 21 nt, Artificial Sequence
  Description of Artificial Sequence: Synthetic oligonucleotide
aaauagucuacaaaccaguua

SEQ ID NO: 182 - RNA, 21 nt, Artificial Sequence
  Description of Artificial Sequence: Synthetic oligonucleotide
uacaaaccaguugaccugaga

SEQ ID NO: 183 - RNA, 21 nt, Artificial Sequence
  Description of Artificial Sequence: Synthetic oligonucleotide
guugaccugagcaaggugaca

SEQ ID NO: 184 - RNA, 21 nt, Artificial Sequence
  Description of Artificial Sequence: Synthetic oligonucleotide
cuacaaaccaguugaccugaa

SEQ ID NO: 185 - RNA, 21 nt, Artificial Sequence
  Description of Artificial Sequence: Synthetic oligonucleotide
gugugcaaauagucuacaaaa

SEQ ID NO: 186 - RNA, 21 nt, Artificial Sequence
  Description of Artificial Sequence: Synthetic oligonucleotide
gcucauuaggcaacauccaua

SEQ ID NO: 187 - RNA, 21 nt, Artificial Sequence
  Description of Artificial Sequence: Synthetic oligonucleotide
aaaccaguugaccugagcaaa

SEQ ID NO: 188 - RNA, 21 nt, Artificial Sequence
  Description of Artificial Sequence: Synthetic oligonucleotide
ccaaguguggcucauuaggca

SEQ ID NO: 189 - RNA, 21 nt, Artificial Sequence
  Description of Artificial Sequence: Synthetic oligonucleotide
ugugcaaauagucuacaaaca

SEQ ID NO: 190 - RNA, 21 nt, Artificial Sequence
  Description of Artificial Sequence: Synthetic oligonucleotide
aggcaacauccaucauaaaca

SEQ ID NO: 191 - RNA, 21 nt, Artificial Sequence
  Description of Artificial Sequence: Synthetic oligonucleotide
ccugagcaaggugaccuccaa

SEQ ID NO: 192 - RNA, 21 nt, Artificial Sequence
  Description of Artificial Sequence: Synthetic oligonucleotide
gaccuccaaguguggcucaua

SEQ ID NO: 193 - RNA, 21 nt, Artificial Sequence
  Description of Artificial Sequence: Synthetic oligonucleotide
uccaaguguggcucauuagga

SEQ ID NO: 194 - RNA, 21 nt, Artificial Sequence
  Description of Artificial Sequence: Synthetic oligonucleotide
auuaggcaacauccaucauaa

SEQ ID NO: 195 - RNA, 21 nt, Artificial Sequence
  Description of Artificial Sequence: Synthetic oligonucleotide
cugagcaaggugaccuccaaa

SEQ ID NO: 196 - RNA, 21 nt, Artificial Sequence
  Description of Artificial Sequence: Synthetic oligonucleotide
cauuaggcaacauccaucaua

SEQ ID NO: 197 - RNA, 21 nt, Artificial Sequence
  Description of Artificial Sequence: Synthetic oligonucleotide
ggcucauuaggcaacauccaa

SEQ ID NO: 198 - RNA, 21 nt, Artificial Sequence
  Description of Artificial Sequence: Synthetic oligonucleotide
agugugcaaauagucuacaaa

SEQ ID NO: 199 - RNA, 21 nt, Artificial Sequence
  Description of Artificial Sequence: Synthetic oligonucleotide
ucauuaggcaacauccaucaa

SEQ ID NO: 200 - RNA, 21 nt, Artificial Sequence
  Description of Artificial Sequence: Synthetic oligonucleotide
aguguggcucauuaggcaaca

SEQ ID NO: 201 - RNA, 21 nt, Artificial Sequence
  Description of Artificial Sequence: Synthetic oligonucleotide
ggugaccuccaaguguggcua

SEQ ID NO: 202 - RNA, 21 nt, Artificial Sequence
  Description of Artificial Sequence: Synthetic oligonucleotide
gagcaaggugaccuccaagua

SEQ ID NO: 203 - RNA, 21 nt, Artificial Sequence
  Description of Artificial Sequence: Synthetic oligonucleotide
acaaaccaguugaccugagca

SEQ ID NO: 204 - RNA, 21 nt, Artificial Sequence
  Description of Artificial Sequence: Synthetic oligonucleotide
accuccaaguguggcucauua

SEQ ID NO: 205 - RNA, 21 nt, Artificial Sequence
  Description of Artificial Sequence: Synthetic oligonucleotide
cagugugcaaauagucuacaa

SEQ ID NO: 206 - RNA, 21 nt, Artificial Sequence
  Description of Artificial Sequence: Synthetic oligonucleotide
aaguguggcucauuaggcaaa

SEQ ID NO: 207 - RNA, 21 nt, Artificial Sequence
  Description of Artificial Sequence: Synthetic oligonucleotide
uugaccugagcaaggugacca

SEQ ID NO: 208 - RNA, 21 nt, Artificial Sequence
  Description of Artificial Sequence: Synthetic oligonucleotide
caacauccaucauaaaccaga

SEQ ID NO: 209 - RNA, 21 nt, Artificial Sequence
  Description of Artificial Sequence: Synthetic oligonucleotide
gugcaaauagucuacaaacca

SEQ ID NO: 210 - RNA, 21 nt, Artificial Sequence
  Description of Artificial Sequence: Synthetic oligonucleotide
ugaccuccaaguguggcucaa

SEQ ID NO: 211 - RNA, 21 nt, Artificial Sequence
  Description of Artificial Sequence: Synthetic oligonucleotide
gcaacauccaucauaaaccaa

SEQ ID NO: 212 - RNA, 21 nt, Artificial Sequence
  Description of Artificial Sequence: Synthetic oligonucleotide
caaguguggcucauuaggcaa

SEQ ID NO: 213 - RNA, 21 nt, Artificial Sequence
  Description of Artificial Sequence: Synthetic oligonucleotide
gcagugugcaaauagucuaca

SEQ ID NO: 214 - RNA, 21 nt, Artificial Sequence
  Description of Artificial Sequence: Synthetic oligonucleotide
guggcucauuaggcaacauca

SEQ ID NO: 215 - RNA, 21 nt, Artificial Sequence
  Description of Artificial Sequence: Synthetic oligonucleotide
caaaccaguugaccugagcaa

SEQ ID NO: 216 - RNA, 21 nt, Artificial Sequence
  Description of Artificial Sequence: Synthetic oligonucleotide
ugagcaaggugaccuccaaga

SEQ ID NO: 217 - RNA, 21 nt, Artificial Sequence
  Description of Artificial Sequence: Synthetic oligonucleotide
aaggugaccuccaagugugga

SEQ ID NO: 218 - RNA, 21 nt, Artificial Sequence
  Description of Artificial Sequence: Synthetic oligonucleotide
cucauuaggcaacauccauca

SEQ ID NO: 219 - RNA, 21 nt, Artificial Sequence
  Description of Artificial Sequence: Synthetic oligonucleotide
gugaccuccaaguguggcuca

SEQ ID NO: 220 - RNA, 21 nt, Artificial Sequence
  Description of Artificial Sequence: Synthetic oligonucleotide
caguugaccugagcaagguga

SEQ ID NO: 221 - RNA, 21 nt, Artificial Sequence
  Description of Artificial Sequence: Synthetic oligonucleotide
aggugaccuccaaguguggca

SEQ ID NO: 222 - RNA, 21 nt, Artificial Sequence
  Description of Artificial Sequence: Synthetic oligonucleotide
uggcucauuaggcaacaucca

SEQ ID NO: 223 - RNA, 21 nt, Artificial Sequence
  Description of Artificial Sequence: Synthetic oligonucleotide
uuaggcaacauccaucauaaa

SEQ ID NO: 224 - RNA, 21 nt, Artificial Sequence
  Description of Artificial Sequence: Synthetic oligonucleotide
accugagcaaggugaccucca

SEQ ID NO: 225 - RNA, 21 nt, Artificial Sequence
  Description of Artificial Sequence: Synthetic oligonucleotide
ccuccaaguguggcucauuaa

SEQ ID NO: 226 - RNA, 21 nt, Artificial Sequence
  Description of Artificial Sequence: Synthetic oligonucleotide
aguugaccugagcaaggugaa

SEQ ID NO: 227 - RNA, 21 nt, Artificial Sequence
  Description of Artificial Sequence: Synthetic oligonucleotide
guguggcucauuaggcaacaa

SEQ ID NO: 228 - RNA, 21 nt, Artificial Sequence
  Description of Artificial Sequence: Synthetic oligonucleotide
aggcggcagugugcaaauaga

SEQ ID NO: 229 - RNA, 21 nt, Artificial Sequence
  Description of Artificial Sequence: Synthetic oligonucleotide
gcggcagugugcaaauaguca

SEQ ID NO: 230 - RNA, 21 nt, Artificial Sequence
  Description of Artificial Sequence: Synthetic oligonucleotide
uaggcaacauccaucauaaaa

SEQ ID NO: 231 - RNA, 21 nt, Artificial Sequence
  Description of Artificial Sequence: Synthetic oligonucleotide
uguggcucauuaggcaacaua

SEQ ID NO: 232 - RNA, 21 nt, Artificial Sequence
  Description of Artificial Sequence: Synthetic oligonucleotide
cuccaaguguggcucauuaga

SEQ ID NO: 233 - RNA, 21 nt, Artificial Sequence
  Description of Artificial Sequence: Synthetic oligonucleotide
ggcagugugcaaauagucuaa

SEQ ID NO: 234 - RNA, 21 nt, Artificial Sequence
  Description of Artificial Sequence: Synthetic oligonucleotide
cggcagugugcaaauagucua

SEQ ID NO: 235 - RNA, 21 nt, Artificial Sequence
  Description of Artificial Sequence: Synthetic oligonucleotide
ggcggcagugugcaaauagua

SEQ ID NO: 236 - RNA, 21 nt, Artificial Sequence
  Description of Artificial Sequence: Synthetic oligonucleotide
ggaggcggcagugugcaaaua

SEQ ID NO: 237 - RNA, 21 nt, Artificial Sequence
  Description of Artificial Sequence: Synthetic oligonucleotide
gaggcggcagugugcaaauaa

SEQ ID NO: 238 - RNA, 23 nt, Artificial Sequence
  Description of Artificial Sequence: Synthetic oligonucleotide
uucaacugguuuguagacuauuu

SEQ ID NO: 239 - RNA, 23 nt, Artificial Sequence
  Description of Artificial Sequence: Synthetic oligonucleotide
uaggucaacugguuuguagacua

SEQ ID NO: 240 - RNA, 23 nt, Artificial Sequence
  Description of Artificial Sequence: Synthetic oligonucleotide
ucugguuuguagacuauuugcac

SEQ ID NO: 241 - RNA, 23 nt, Artificial Sequence
  Description of Artificial Sequence: Synthetic oligonucleotide
uccuugcucaggucaacugguuu

SEQ ID NO: 242 - RNA, 23 nt, Artificial Sequence
  Description of Artificial Sequence: Synthetic oligonucleotide
ucuugcucaggucaacugguuug

SEQ ID NO: 243 - RNA, 23 nt, Artificial Sequence
  Description of Artificial Sequence: Synthetic oligonucleotide
uugguuuguagacuauuugcaca

SEQ ID NO: 244 - RNA, 23 nt, Artificial Sequence
  Description of Artificial Sequence: Synthetic oligonucleotide
uggucaacugguuuguagacuau

SEQ ID NO: 245 - RNA, 23 nt, Artificial Sequence
  Description of Artificial Sequence: Synthetic oligonucleotide
ucacuuggaggucaccuugcuca

SEQ ID NO: 246 - RNA, 23 nt, Artificial Sequence
  Description of Artificial Sequence: Synthetic oligonucleotide
ucaacugguuuguagacuauuug

SEQ ID NO: 247 - RNA, 23 nt, Artificial Sequence
  Description of Artificial Sequence: Synthetic oligonucleotide
uaggucaccuugcucaggucaac

SEQ ID NO: 248 - RNA, 23 nt, Artificial Sequence
  Description of Artificial Sequence: Synthetic oligonucleotide
uacacuuggaggucaccuugcuc

SEQ ID NO: 249 - RNA, 23 nt, Artificial Sequence
  Description of Artificial Sequence: Synthetic oligonucleotide
ugucaacugguuuguagacuauu

SEQ ID NO: 250 - RNA, 23 nt, Artificial Sequence
  Description of Artificial Sequence: Synthetic oligonucleotide
uacugguuuguagacuauuugca

SEQ ID NO: 251 - RNA, 23 nt, Artificial Sequence
  Description of Artificial Sequence: Synthetic oligonucleotide
ucaggucaacugguuuguagacu

SEQ ID NO: 252 - RNA, 23 nt, Artificial Sequence
  Description of Artificial Sequence: Synthetic oligonucleotide
ugaggucaccuugcucaggucaa

SEQ ID NO: 253 - RNA, 23 nt, Artificial Sequence
  Description of Artificial Sequence: Synthetic oligonucleotide
ucacacuuggaggucaccuugcu

SEQ ID NO: 254 - RNA, 23 nt, Artificial Sequence
  Description of Artificial Sequence: Synthetic oligonucleotide
uaccuugcucaggucaacugguu

SEQ ID NO: 255 - RNA, 23 nt, Artificial Sequence
  Description of Artificial Sequence: Synthetic oligonucleotide
ugguuuaugauggauguugccua

SEQ ID NO: 256 - RNA, 23 nt, Artificial Sequence
  Description of Artificial Sequence: Synthetic oligonucleotide
uaacugguuuguagacuauuugc

SEQ ID NO: 257 - RNA, 23 nt, Artificial Sequence
  Description of Artificial Sequence: Synthetic oligonucleotide
ucucaggucaacugguuuguaga

SEQ ID NO: 258 - RNA, 23 nt, Artificial Sequence
  Description of Artificial Sequence: Synthetic oligonucleotide
ugucaccuugcucaggucaacug

SEQ ID NO: 259 - RNA, 23 nt, Artificial Sequence
  Description of Artificial Sequence: Synthetic oligonucleotide
uucaggucaacugguuuguagac

SEQ ID NO: 260 - RNA, 23 nt, Artificial Sequence
  Description of Artificial Sequence: Synthetic oligonucleotide
uuuuguagacuauuugcacacug

SEQ ID NO: 261 - RNA, 23 nt, Artificial Sequence
  Description of Artificial Sequence: Synthetic oligonucleotide
uauggauguugccuaaugagcca

SEQ ID NO: 262 - RNA, 23 nt, Artificial Sequence
  Description of Artificial Sequence: Synthetic oligonucleotide
uuugcucaggucaacugguuugu

SEQ ID NO: 263 - RNA, 23 nt, Artificial Sequence
  Description of Artificial Sequence: Synthetic oligonucleotide
ugccuaaugagccacacuuggag

SEQ ID NO: 264 - RNA, 23 nt, Artificial Sequence
  Description of Artificial Sequence: Synthetic oligonucleotide
uguuuguagacuauuugcacacu

SEQ ID NO: 265 - RNA, 23 nt, Artificial Sequence
  Description of Artificial Sequence: Synthetic oligonucleotide
uguuuaugauggauguugccuaa

SEQ ID NO: 266 - RNA, 23 nt, Artificial Sequence
  Description of Artificial Sequence: Synthetic oligonucleotide
uuggaggucaccuugcucagguc

SEQ ID NO: 267 - RNA, 23 nt, Artificial Sequence
  Description of Artificial Sequence: Synthetic oligonucleotide
uaugagccacacuuggaggucac

SEQ ID NO: 268 - RNA, 23 nt, Artificial Sequence
  Description of Artificial Sequence: Synthetic oligonucleotide
uccuaaugagccacacuuggagg

SEQ ID NO: 269 - RNA, 23 nt, Artificial Sequence
  Description of Artificial Sequence: Synthetic oligonucleotide
uuaugauggauguugccuaauga

SEQ ID NO: 270 - RNA, 23 nt, Artificial Sequence
  Description of Artificial Sequence: Synthetic oligonucleotide
uuuggaggucaccuugcucaggu

SEQ ID NO: 271 - RNA, 23 nt, Artificial Sequence
  Description of Artificial Sequence: Synthetic oligonucleotide
uaugauggauguugccuaaugag

SEQ ID NO: 272 - RNA, 23 nt, Artificial Sequence
  Description of Artificial Sequence: Synthetic oligonucleotide
uuggauguugccuaaugagccac

SEQ ID NO: 273 - RNA, 23 nt, Artificial Sequence
  Description of Artificial Sequence: Synthetic oligonucleotide
uuuguagacuauuugcacacugc

SEQ ID NO: 274 - RNA, 23 nt, Artificial Sequence
  Description of Artificial Sequence: Synthetic oligonucleotide
uugauggauguugccuaaugagc

SEQ ID NO: 275 - RNA, 23 nt, Artificial Sequence
  Description of Artificial Sequence: Synthetic oligonucleotide
uguugccuaaugagccacacuug

SEQ ID NO: 276 - RNA, 23 nt, Artificial Sequence
  Description of Artificial Sequence: Synthetic oligonucleotide
uagccacacuuggaggucaccuu

SEQ ID NO: 277 - RNA, 23 nt, Artificial Sequence
  Description of Artificial Sequence: Synthetic oligonucleotide
uacuuggaggucaccuugcucag

SEQ ID NO: 278 - RNA, 23 nt, Artificial Sequence
  Description of Artificial Sequence: Synthetic oligonucleotide
ugcucaggucaacugguuuguag

SEQ ID NO: 279 - RNA, 23 nt, Artificial Sequence
  Description of Artificial Sequence: Synthetic oligonucleotide
uaaugagccacacuuggagguca

SEQ ID NO: 280 - RNA, 23 nt, Artificial Sequence
  Description of Artificial Sequence: Synthetic oligonucleotide
uuguagacuauuugcacacugcc

SEQ ID NO: 281 - RNA, 23 nt, Artificial Sequence
  Description of Artificial Sequence: Synthetic oligonucleotide
uuugccuaaugagccacacuugg

SEQ ID NO: 282 - RNA, 23 nt, Artificial Sequence
  Description of Artificial Sequence: Synthetic oligonucleotide
uggucaccuugcucaggucaacu

SEQ ID NO: 283 - RNA, 23 nt, Artificial Sequence
  Description of Artificial Sequence: Synthetic oligonucleotide
ucugguuuaugauggauguugcc

SEQ ID NO: 284 - RNA, 23 nt, Artificial Sequence
  Description of Artificial Sequence: Synthetic oligonucleotide
ugguuuguagacuauuugcacac

SEQ ID NO: 285 - RNA, 23 nt, Artificial Sequence
  Description of Artificial Sequence: Synthetic oligonucleotide
uugagccacacuuggaggucacc

SEQ ID NO: 286 - RNA, 23 nt, Artificial Sequence
  Description of Artificial Sequence: Synthetic oligonucleotide
uugguuuaugauggauguugccu

SEQ ID NO: 287 - RNA, 23 nt, Artificial Sequence
  Description of Artificial Sequence: Synthetic oligonucleotide
uugccuaaugagccacacuugga

SEQ ID NO: 288 - RNA, 23 nt, Artificial Sequence
  Description of Artificial Sequence: Synthetic oligonucleotide
uguagacuauuugcacacugccg

SEQ ID NO: 289 - RNA, 23 nt, Artificial Sequence
  Description of Artificial Sequence: Synthetic oligonucleotide
ugauguugccuaaugagccacac

SEQ ID NO: 290 - RNA, 23 nt, Artificial Sequence
  Description of Artificial Sequence: Synthetic oligonucleotide
uugcucaggucaacugguuugua

SEQ ID NO: 291 - RNA, 23 nt, Artificial Sequence
  Description of Artificial Sequence: Synthetic oligonucleotide
ucuuggaggucaccuugcucagg

SEQ ID NO: 292 - RNA, 23 nt, Artificial Sequence
  Description of Artificial Sequence: Synthetic oligonucleotide
uccacacuuggaggucaccuugc

SEQ ID NO: 293 - RNA, 23 nt, Artificial Sequence
  Description of Artificial Sequence: Synthetic oligonucleotide
ugauggauguugccuaaugagcc

SEQ ID NO: 294 - RNA, 23 nt, Artificial Sequence
  Description of Artificial Sequence: Synthetic oligonucleotide
ugagccacacuuggaggucaccu

SEQ ID NO: 295 - RNA, 23 nt, Artificial Sequence
  Description of Artificial Sequence: Synthetic oligonucleotide
ucaccuugcucaggucaacuggu

SEQ ID NO: 296 - RNA, 23 nt, Artificial Sequence
  Description of Artificial Sequence: Synthetic oligonucleotide
ugccacacuuggaggucaccuug

SEQ ID NO: 297 - RNA, 23 nt, Artificial Sequence
  Description of Artificial Sequence: Synthetic oligonucleotide
uggauguugccuaaugagccaca

SEQ ID NO: 298 - RNA, 23 nt, Artificial Sequence
  Description of Artificial Sequence: Synthetic oligonucleotide
uuuaugauggauguugccuaaug

SEQ ID NO: 299 - RNA, 23 nt, Artificial Sequence
  Description of Artificial Sequence: Synthetic oligonucleotide
uggaggucaccuugcucagguca

SEQ ID NO: 300 - RNA, 23 nt, Artificial Sequence
  Description of Artificial Sequence: Synthetic oligonucleotide
uuaaugagccacacuuggagguc

SEQ ID NO: 301 - RNA, 23 nt, Artificial Sequence
  Description of Artificial Sequence: Synthetic oligonucleotide
uucaccuugcucaggucaacugg

SEQ ID NO: 302 - RNA, 23 nt, Artificial Sequence
  Description of Artificial Sequence: Synthetic oligonucleotide
uuguugccuaaugagccacacuu

SEQ ID NO: 303 - RNA, 23 nt, Artificial Sequence
  Description of Artificial Sequence: Synthetic oligonucleotide
ucuauuugcacacugccgccucc

SEQ ID NO: 304 - RNA, 23 nt, Artificial Sequence
  Description of Artificial Sequence: Synthetic oligonucleotide
ugacuauuugcacacugccgccu

SEQ ID NO: 305 - RNA, 23 nt, Artificial Sequence
  Description of Artificial Sequence: Synthetic oligonucleotide
uuuuaugauggauguugccuaau

SEQ ID NO: 306 - RNA, 23 nt, Artificial Sequence
  Description of Artificial Sequence: Synthetic oligonucleotide
uauguugccuaaugagccacacu

SEQ ID NO: 307 - RNA, 23 nt, Artificial Sequence
  Description of Artificial Sequence: Synthetic oligonucleotide
ucuaaugagccacacuuggaggu

SEQ ID NO: 308 - RNA, 23 nt, Artificial Sequence
  Description of Artificial Sequence: Synthetic oligonucleotide
uuagacuauuugcacacugccgc

SEQ ID NO: 309 - RNA, 23 nt, Artificial Sequence
  Description of Artificial Sequence: Synthetic oligonucleotide
uagacuauuugcacacugccgcc

SEQ ID NO: 310 - RNA, 23 nt, Artificial Sequence
  Description of Artificial Sequence: Synthetic oligonucleotide
uacuauuugcacacugccgccuc

SEQ ID NO: 311 - RNA, 23 nt, Artificial Sequence
  Description of Artificial Sequence: Synthetic oligonucleotide
uauuugcacacugccgccucccg

SEQ ID NO: 312 - RNA, 23 nt, Artificial Sequence
  Description of Artificial Sequence: Synthetic oligonucleotide
uuauuugcacacugccgccuccc

SEQ ID NO: 313 - RNA, 23 nt, Artificial Sequence
  Description of Artificial Sequence: Synthetic oligonucleotide
aaauagucuacaaaccaguugac

SEQ ID NO: 314 - RNA, 23 nt, Artificial Sequence
  Description of Artificial Sequence: Synthetic oligonucleotide
uagucuacaaaccaguugaccug

SEQ ID NO: 315 - RNA, 23 nt, Artificial Sequence
  Description of Artificial Sequence: Synthetic oligonucleotide
gugcaaauagucuacaaaccagu

SEQ ID NO: 316 - RNA, 23 nt, Artificial Sequence
  Description of Artificial Sequence: Synthetic oligonucleotide
aaaccaguugaccugagcaaggu

SEQ ID NO: 317 - RNA, 23 nt, Artificial Sequence
  Description of Artificial Sequence: Synthetic oligonucleotide
caaaccaguugaccugagcaagg

SEQ ID NO: 318 - RNA, 23 nt, Artificial Sequence
  Description of Artificial Sequence: Synthetic oligonucleotide
aggugcaaauagucuacaaacca

SEQ ID NO: 319 - RNA, 23 nt, Artificial Sequence
  Description of Artificial Sequence: Synthetic oligonucleotide
auagucuacaaaccaguugaccu

SEQ ID NO: 320 - RNA, 23 nt, Artificial Sequence
  Description of Artificial Sequence: Synthetic oligonucleotide
ugagcaaggugaccuccaagugu

SEQ ID NO: 321 - RNA, 23 nt, Artificial Sequence
  Description of Artificial Sequence: Synthetic oligonucleotide
caaauagucuacaaaccaguuga

SEQ ID NO: 322 - RNA, 23 nt, Artificial Sequence
  Description of Artificial Sequence: Synthetic oligonucleotide
guugaccugagcaaggugaccuc

SEQ ID NO: 323 - RNA, 23 nt, Artificial Sequence
  Description of Artificial Sequence: Synthetic oligonucleotide
gagcaaggugaccuccaagugug

SEQ ID NO: 324 - RNA, 23 nt, Artificial Sequence
  Description of Artificial Sequence: Synthetic oligonucleotide
aauagucuacaaaccaguugacc

SEQ ID NO: 325 - RNA, 23 nt, Artificial Sequence
  Description of Artificial Sequence: Synthetic oligonucleotide
ugcaaauagucuacaaaccaguu

SEQ ID NO: 326 - RNA, 23 nt, Artificial Sequence
  Description of Artificial Sequence: Synthetic oligonucleotide
agucuacaaaccaguugaccuga

SEQ ID NO: 327 - RNA, 23 nt, Artificial Sequence
  Description of Artificial Sequence: Synthetic oligonucleotide
uugaccugagcaaggugaccucc

SEQ ID NO: 328 - RNA, 23 nt, Artificial Sequence
  Description of Artificial Sequence: Synthetic oligonucleotide
agcaaggugaccuccaagugugg

SEQ ID NO: 329 - RNA, 23 nt, Artificial Sequence
  Description of Artificial Sequence: Synthetic oligonucleotide
aaccaguugaccugagcaaggug

SEQ ID NO: 330 - RNA, 23 nt, Artificial Sequence
  Description of Artificial Sequence: Synthetic oligonucleotide
uaggcaacauccaucauaaacca

SEQ ID NO: 331 - RNA, 23 nt, Artificial Sequence
  Description of Artificial Sequence: Synthetic oligonucleotide
gcaaauagucuacaaaccaguug

SEQ ID NO: 332 - RNA, 23 nt, Artificial Sequence
  Description of Artificial Sequence: Synthetic oligonucleotide
ucuacaaaccaguugaccugagc

SEQ ID NO: 333 - RNA, 23 nt, Artificial Sequence
  Description of Artificial Sequence: Synthetic oligonucleotide
caguugaccugagcaaggugacc

SEQ ID NO: 334 - RNA, 23 nt, Artificial Sequence
  Description of Artificial Sequence: Synthetic oligonucleotide
gucuacaaaccaguugaccugag

SEQ ID NO: 335 - RNA, 23 nt, Artificial Sequence
  Description of Artificial Sequence: Synthetic oligonucleotide
cagugugcaaauagucuacaaac

SEQ ID NO: 336 - RNA, 23 nt, Artificial Sequence
  Description of Artificial Sequence: Synthetic oligonucleotide
uggcucauuaggcaacauccauc

SEQ ID NO: 337 - RNA, 23 nt, Artificial Sequence
  Description of Artificial Sequence: Synthetic oligonucleotide
acaaaccaguugaccugagcaag

SEQ ID NO: 338 - RNA, 23 nt, Artificial Sequence
  Description of Artificial Sequence: Synthetic oligonucleotide
cuccaaguguggcucauuaggca

SEQ ID NO: 339 - RNA, 23 nt, Artificial Sequence
  Description of Artificial Sequence: Synthetic oligonucleotide
agugugcaaauagucuacaaacc

SEQ ID NO: 340 - RNA, 23 nt, Artificial Sequence
  Description of Artificial Sequence: Synthetic oligonucleotide
uuaggcaacauccaucauaaacc

SEQ ID NO: 341 - RNA, 23 nt, Artificial Sequence
  Description of Artificial Sequence: Synthetic oligonucleotide
gaccugagcaaggugaccuccaa

SEQ ID NO: 342 - RNA, 23 nt, Artificial Sequence
  Description of Artificial Sequence: Synthetic oligonucleotide
gugaccuccaaguguggcucauu

SEQ ID NO: 343 - RNA, 23 nt, Artificial Sequence
  Description of Artificial Sequence: Synthetic oligonucleotide
ccuccaaguguggcucauuaggc

SEQ ID NO: 344 - RNA, 23 nt, Artificial Sequence
  Description of Artificial Sequence: Synthetic oligonucleotide
ucauuaggcaacauccaucauaa

SEQ ID NO: 345 - RNA, 23 nt, Artificial Sequence
  Description of Artificial Sequence: Synthetic oligonucleotide
accugagcaaggugaccuccaag

SEQ ID NO: 346 - RNA, 23 nt, Artificial Sequence
  Description of Artificial Sequence: Synthetic oligonucleotide
cucauuaggcaacauccaucaua

SEQ ID NO: 347 - RNA, 23 nt, Artificial Sequence
  Description of Artificial Sequence: Synthetic oligonucleotide
guggcucauuaggcaacauccau

SEQ ID NO: 348 - RNA, 23 nt, Artificial Sequence
  Description of Artificial Sequence: Synthetic oligonucleotide
gcagugugcaaauagucuacaag

SEQ ID NO: 349 - RNA, 23 nt, Artificial Sequence
  Description of Artificial Sequence: Synthetic oligonucleotide
gcucauuaggcaacauccaucau

SEQ ID NO: 350 - RNA, 23 nt, Artificial Sequence
  Description of Artificial Sequence: Synthetic oligonucleotide
caaguguggcucauuaggcaaca

SEQ ID NO: 351 - RNA, 23 nt, Artificial Sequence
  Description of Artificial Sequence: Synthetic oligonucleotide
aaggugaccuccaaguguggcuc

SEQ ID NO: 352 - RNA, 23 nt, Artificial Sequence
  Description of Artificial Sequence: Synthetic oligonucleotide
cugagcaaggugaccuccaagug

SEQ ID NO: 353 - RNA, 23 nt, Artificial Sequence
  Description of Artificial Sequence: Synthetic oligonucleotide
cuacaaaccaguugaccugagca

SEQ ID NO: 354 - RNA, 23 nt, Artificial Sequence
  Description of Artificial Sequence: Synthetic oligonucleotide
ugaccuccaaguguggcucauua

SEQ ID NO: 355 - RNA, 23 nt, Artificial Sequence
  Description of Artificial Sequence: Synthetic oligonucleotide
ggcagugugcaaauagucuacaa

SEQ ID NO: 356 - RNA, 23 nt, Artificial Sequence
  Description of Artificial Sequence: Synthetic oligonucleotide
ccaaguguggcucauuaggcaac

SEQ ID NO: 357 - RNA, 23 nt, Artificial Sequence
  Description of Artificial Sequence: Synthetic oligonucleotide
aguugaccugagcaaggugaccu

SEQ ID NO: 358 - RNA, 23 nt, Artificial Sequence
  Description of Artificial Sequence: Synthetic oligonucleotide
ggcaacauccaucauaaaccagg

SEQ ID NO: 359 - RNA, 23 nt, Artificial Sequence
  Description of Artificial Sequence: Synthetic oligonucleotide
aggugcaaauagucuacaaacca

SEQ ID NO: 360 - RNA, 23 nt, Artificial Sequence
  Description of Artificial Sequence: Synthetic oligonucleotide
ggugaccuccaaguguggcucau

SEQ ID NO: 361 - RNA, 23 nt, Artificial Sequence
  Description of Artificial Sequence: Synthetic oligonucleotide
aggcaacauccaucauaaaccag

SEQ ID NO: 362 - RNA, 23 nt, Artificial Sequence
  Description of Artificial Sequence: Synthetic oligonucleotide
uccaaguguggcucauuaggcaa

SEQ ID NO: 363 - RNA, 21 nt, Artificial Sequence
  Description of Artificial Sequence: Synthetic oligonucleotide
gcagugugcaaauagucuaca

SEQ ID NO: 364 - RNA, 23 nt, Artificial Sequence
  Description of Artificial Sequence: Synthetic oligonucleotide
guguggcucauuaggcaacaucc

SEQ ID NO: 365 - RNA, 23 nt, Artificial Sequence
  Description of Artificial Sequence: Synthetic oligonucleotide
uacaaaccaguugaccugagcaa

SEQ ID NO: 366 - RNA, 23 nt, Artificial Sequence
  Description of Artificial Sequence: Synthetic oligonucleotide
ccugagcaaggugaccuccaagu

SEQ ID NO: 367 - RNA, 23 nt, Artificial Sequence
  Description of Artificial Sequence: Synthetic oligonucleotide
gcaaggugaccuccaaguguggc

SEQ ID NO: 368 - RNA, 23 nt, Artificial Sequence
  Description of Artificial Sequence: Synthetic oligonucleotide
ggcucauuaggcaacauccauca

SEQ ID NO: 369 - RNA, 23 nt, Artificial Sequence
  Description of Artificial Sequence: Synthetic oligonucleotide
aggugaccuccaaguguggcuca

SEQ ID NO: 370 - RNA, 23 nt, Artificial Sequence
  Description of Artificial Sequence: Synthetic oligonucleotide
accaguugaccugagcaagguga

SEQ ID NO: 371 - RNA, 23 nt, Artificial Sequence
  Description of Artificial Sequence: Synthetic oligonucleotide
caaggugaccuccaaguguggcu

SEQ ID NO: 372 - RNA, 23 nt, Artificial Sequence
  Description of Artificial Sequence: Synthetic oligonucleotide
uguggcucauuaggcaacaucca

SEQ ID NO: 373 - RNA, 23 nt, Artificial Sequence
  Description of Artificial Sequence: Synthetic oligonucleotide
cauuaggcaacauccaucauaaa

SEQ ID NO: 374 - RNA, 23 nt, Artificial Sequence
  Description of Artificial Sequence: Synthetic oligonucleotide
ugaccugagcaaggugaccucca

SEQ ID NO: 375 - RNA, 23 nt, Artificial Sequence
  Description of Artificial Sequence: Synthetic oligonucleotide
gaccuccaaguguggcucauuag

SEQ ID NO: 376 - RNA, 23 nt, Artificial Sequence
  Description of Artificial Sequence: Synthetic oligonucleotide
ccaguugaccugagcaaggugac

SEQ ID NO: 377 - RNA, 23 nt, Artificial Sequence
  Description of Artificial Sequence: Synthetic oligonucleotide
aaguguggcucauuaggcaacau

SEQ ID NO: 378 - RNA, 23 nt, Artificial Sequence
  Description of Artificial Sequence: Synthetic oligonucleotide
ggaggcggcagugugcaaauagu

SEQ ID NO: 379 - RNA, 23 nt, Artificial Sequence
  Description of Artificial Sequence: Synthetic oligonucleotide
aggcggcagugugcaaauagucu

SEQ ID NO: 380 - RNA, 23 nt, Artificial Sequence
  Description of Artificial Sequence: Synthetic oligonucleotide
auuaggcaacauccaucauaaac

SEQ ID NO: 381 - RNA, 23 nt, Artificial Sequence
  Description of Artificial Sequence: Synthetic oligonucleotide
aguguggcucauuaggcaacauc

SEQ ID NO: 382 - RNA, 23 nt, Artificial Sequence
  Description of Artificial Sequence: Synthetic oligonucleotide
accuccaaguguggcucauuagg

SEQ ID NO: 383 - RNA, 23 nt, Artificial Sequence
  Description of Artificial Sequence: Synthetic oligonucleotide
gcggcagugugcaaauagucuac

SEQ ID NO: 384 - RNA, 23 nt, Artificial Sequence
  Description of Artificial Sequence: Synthetic oligonucleotide
ggcggcagugugcaaauagucua

SEQ ID NO: 385 - RNA, 23 nt, Artificial Sequence
  Description of Artificial Sequence: Synthetic oligonucleotide
gaggcggcagugugcaaauaguc

SEQ ID NO: 386 - RNA, 23 nt, Artificial Sequence
  Description of Artificial Sequence: Synthetic oligonucleotide
cgggaggcggcagugugcaaaua

SEQ ID NO: 387 - RNA, 23 nt, Artificial Sequence
  Description of Artificial Sequence: Synthetic oligonucleotide
gggaggcggcagugugcaaauag

SEQ ID NO: 388 - RNA, 21 nt, Artificial Sequence
  Description of Artificial Sequence: Synthetic oligonucleotide
agcucgcauggucaguaaaaa

SEQ ID NO: 389 - RNA, 21 nt, Artificial Sequence
  Description of Artificial Sequence: Synthetic oligonucleotide
gcucgcauggucaguaaaaga

SEQ ID NO: 390 - RNA, 21 nt, Artificial Sequence
  Description of Artificial Sequence: Synthetic oligonucleotide
uauuguguguuuuaacaaaua

SEQ ID NO: 391 - RNA, 21 nt, Artificial Sequence
  Description of Artificial Sequence: Synthetic oligonucleotide
cagcaacaaaggauuugaaaa

SEQ ID NO: 392 - RNA, 21 nt, Artificial Sequence
  Description of Artificial Sequence: Synthetic oligonucleotide
gcuaaccaguucucuuuguaa

SEQ ID NO: 393 - RNA, 21 nt, Artificial Sequence
  Description of Artificial Sequence: Synthetic oligonucleotide
uaguuggauuugucuguuuaa

SEQ ID NO: 394 - RNA, 21 nt, Artificial Sequence
  Description of Artificial Sequence: Synthetic oligonucleotide
gucugugaaugucuauauaga

SEQ ID NO: 395 - RNA, 21 nt, Artificial Sequence
  Description of Artificial Sequence: Synthetic oligonucleotide
caggcaauuccuuuugauuca

SEQ ID NO: 396 - RNA, 21 nt, Artificial Sequence
  Description of Artificial Sequence: Synthetic oligonucleotide
caacaaaggauuugaaacuua

SEQ ID NO: 397 - RNA, 21 nt, Artificial Sequence
  Description of Artificial Sequence: Synthetic oligonucleotide
gcugacucacuuuaucaauaa

SEQ ID NO: 398 - RNA, 21 nt, Artificial Sequence
  Description of Artificial Sequence: Synthetic oligonucleotide
gcagcugaacauauacauaga

SEQ ID NO: 399 - RNA, 21 nt, Artificial Sequence
  Description of Artificial Sequence: Synthetic oligonucleotide
aggacgcauguaucuugaaaa

SEQ ID NO: 400 - RNA, 21 nt, Artificial Sequence
  Description of Artificial Sequence: Synthetic oligonucleotide
uaucuugaaaugcuuguaaaa

SEQ ID NO: 401 - RNA, 21 nt, Artificial Sequence
  Description of Artificial Sequence: Synthetic oligonucleotide
cuaaccaguucucuuuguaaa

SEQ ID NO: 402 - RNA, 21 nt, Artificial Sequence
  Description of Artificial Sequence: Synthetic oligonucleotide
cuuguaaagagguuucuaaca

SEQ ID NO: 403 - RNA, 21 nt, Artificial Sequence
  Description of Artificial Sequence: Synthetic oligonucleotide
gugaaugucuauauaguguaa

SEQ ID NO: 404 - RNA, 21 nt, Artificial Sequence
  Description of Artificial Sequence: Synthetic oligonucleotide
cugucugugaaugucuauaua

SEQ ID NO: 405 - RNA, 21 nt, Artificial Sequence
  Description of Artificial Sequence: Synthetic oligonucleotide
agggacaugaaaucaucuuaa

SEQ ID NO: 406 - RNA, 21 nt, Artificial Sequence
  Description of Artificial Sequence: Synthetic oligonucleotide
uggauuugucuguuuaugcua

SEQ ID NO: 407 - RNA, 21 nt, Artificial Sequence
  Description of Artificial Sequence: Synthetic oligonucleotide
gagcagcugaacauauacaua

SEQ ID NO: 408 - RNA, 21 nt, Artificial Sequence
  Description of Artificial Sequence: Synthetic oligonucleotide
acagaaacccuguuuuauuga

SEQ ID NO: 409 - RNA, 21 nt, Artificial Sequence
  Description of Artificial Sequence: Synthetic oligonucleotide
uaaccaguucucuuuguaaga

SEQ ID NO: 410 - RNA, 21 nt, Artificial Sequence
  Description of Artificial Sequence: Synthetic oligonucleotide
ucuugaaaugcuuguaaagaa

SEQ ID NO: 411 - RNA, 21 nt, Artificial Sequence
  Description of Artificial Sequence: Synthetic oligonucleotide
aguguauuguguguuuuaaca

SEQ ID NO: 412 - RNA, 21 nt, Artificial Sequence
  Description of Artificial Sequence: Synthetic oligonucleotide
cagcugaacauauacauagaa

SEQ ID NO: 413 - RNA, 21 nt, Artificial Sequence
  Description of Artificial Sequence: Synthetic oligonucleotide
aaaggacgcauguaucuugaa

SEQ ID NO: 414 - RNA, 21 nt, Artificial Sequence
  Description of Artificial Sequence: Synthetic oligonucleotide
gcauguaucuugaaaugcuua

SEQ ID NO: 415 - RNA, 21 nt, Artificial Sequence
  Description of Artificial Sequence: Synthetic oligonucleotide
acgcuggcuugugaucuuaaa

SEQ ID NO: 416 - RNA, 21 nt, Artificial Sequence
  Description of Artificial Sequence: Synthetic oligonucleotide
uuuuaacaaaugauuuacaca

SEQ ID NO: 417 - RNA, 21 nt, Artificial Sequence
  Description of Artificial Sequence: Synthetic oligonucleotide
uuguguguuuuaacaaaugaa

SEQ ID NO: 418 - RNA, 21 nt, Artificial Sequence
  Description of Artificial Sequence: Synthetic oligonucleotide
ucugucugugaaugucuauaa

SEQ ID NO: 419 - RNA, 21 nt, Artificial Sequence
  Description of Artificial Sequence: Synthetic oligonucleotide
gcaagucccaugauuucuuca

SEQ ID NO: 420 - RNA, 21 nt, Artificial Sequence
  Description of Artificial Sequence: Synthetic oligonucleotide
cacgcuggcuugugaucuuaa

SEQ ID NO: 421 - RNA, 21 nt, Artificial Sequence
  Description of Artificial Sequence: Synthetic oligonucleotide
uucaccagagugacuaugaua

SEQ ID NO: 422 - RNA, 21 nt, Artificial Sequence
  Description of Artificial Sequence: Synthetic oligonucleotide
gacucacuuuaucaauaguua

SEQ ID NO: 423 - RNA, 21 nt, Artificial Sequence
  Description of Artificial Sequence: Synthetic oligonucleotide
aaggacgcauguaucuugaaa

SEQ ID NO: 424 - RNA, 21 nt, Artificial Sequence
  Description of Artificial Sequence: Synthetic oligonucleotide
cagaaacccuguuuuauugaa

SEQ ID NO: 425 - RNA, 21 nt, Artificial Sequence
  Description of Artificial Sequence: Synthetic oligonucleotide
cugugaaugucuauauaguga

SEQ ID NO: 426 - RNA, 21 nt, Artificial Sequence
  Description of Artificial Sequence: Synthetic oligonucleotide
gaaugucuauauaguguauua

SEQ ID NO: 427 - RNA, 21 nt, Artificial Sequence
  Description of Artificial Sequence: Synthetic oligonucleotide
gcuuguaaagagguuucuaaa

SEQ ID NO: 428 - RNA, 21 nt, Artificial Sequence
  Description of Artificial Sequence: Synthetic oligonucleotide
caugaaaucaucuuagcuuaa

SEQ ID NO: 429 - RNA, 21 nt, Artificial Sequence
  Description of Artificial Sequence: Synthetic oligonucleotide
uguaaagagguuucuaaccca

SEQ ID NO: 430 - RNA, 21 nt, Artificial Sequence
  Description of Artificial Sequence: Synthetic oligonucleotide
gacgcauguaucuugaaauga

SEQ ID NO: 431 - RNA, 21 nt, Artificial Sequence
  Description of Artificial Sequence: Synthetic oligonucleotide
uugcaagucccaugauuucua

SEQ ID NO: 432 - RNA, 21 nt, Artificial Sequence
  Description of Artificial Sequence: Synthetic oligonucleotide
gcagcaacaaaggauuugaaa

SEQ ID NO: 433 - RNA, 21 nt, Artificial Sequence
  Description of Artificial Sequence: Synthetic oligonucleotide
gagggacaugaaaucaucuua

SEQ ID NO: 434 - RNA, 21 nt, Artificial Sequence
  Description of Artificial Sequence: Synthetic oligonucleotide
gcuagauaggauauacuguaa

SEQ ID NO: 435 - RNA, 21 nt, Artificial Sequence
  Description of Artificial Sequence: Synthetic oligonucleotide
ggcuagauaggauauacugua

SEQ ID NO: 436 - RNA, 21 nt, Artificial Sequence
  Description of Artificial Sequence: Synthetic oligonucleotide
aagagguuucuaacccaccca

SEQ ID NO: 437 - RNA, 21 nt, Artificial Sequence
  Description of Artificial Sequence: Synthetic oligonucleotide
guggcagcaacaaaggauuua

SEQ ID NO: 438 - RNA, 21 nt, Artificial Sequence
  Description of Artificial Sequence: Synthetic oligonucleotide
ucugugaaugucuauauagua

SEQ ID NO: 439 - RNA, 21 nt, Artificial Sequence
  Description of Artificial Sequence: Synthetic oligonucleotide
guuggauuugucuguuuauga

SEQ ID NO: 440 - RNA, 21 nt, Artificial Sequence
  Description of Artificial Sequence: Synthetic oligonucleotide
ggagcagcugaacauauacaa

SEQ ID NO: 441 - RNA, 21 nt, Artificial Sequence
  Description of Artificial Sequence: Synthetic oligonucleotide
aucuugaaaugcuuguaaaga

SEQ ID NO: 442 - RNA, 21 nt, Artificial Sequence
  Description of Artificial Sequence: Synthetic oligonucleotide
aaaaggcacgcuggcuuguga

SEQ ID NO: 443 - RNA, 21 nt, Artificial Sequence
  Description of Artificial Sequence: Synthetic oligonucleotide
ccauacugagggugaaauuaa

SEQ ID NO: 444 - RNA, 21 nt, Artificial Sequence
  Description of Artificial Sequence: Synthetic oligonucleotide
cugacucacuuuaucaauaga

SEQ ID NO: 445 - RNA, 21 nt, Artificial Sequence
  Description of Artificial Sequence: Synthetic oligonucleotide
uucugguuuggguacaguuaa

SEQ ID NO: 446 - RNA, 21 nt, Artificial Sequence
  Description of Artificial Sequence: Synthetic oligonucleotide
ugugaaugucuauauagugua

SEQ ID NO: 447 - RNA, 21 nt, Artificial Sequence
  Description of Artificial Sequence: Synthetic oligonucleotide
uccacagaaacccuguuuuaa

SEQ ID NO: 448 - RNA, 21 nt, Artificial Sequence
  Description of Artificial Sequence: Synthetic oligonucleotide
gauuucaaccacauuugcuaa

SEQ ID NO: 449 - RNA, 21 nt, Artificial Sequence
  Description of Artificial Sequence: Synthetic oligonucleotide
uucugucugugaaugucuaua

SEQ ID NO: 450 - RNA, 21 nt, Artificial Sequence
  Description of Artificial Sequence: Synthetic oligonucleotide
ucugguuuggguacaguuaaa

SEQ ID NO: 451 - RNA, 21 nt, Artificial Sequence
  Description of Artificial Sequence: Synthetic oligonucleotide
cauacugagggugaaauuaaa

SEQ ID NO: 452 - RNA, 21 nt, Artificial Sequence
  Description of Artificial Sequence: Synthetic oligonucleotide
ggcacgcuggcuugugaucua

SEQ ID NO: 453 - RNA, 21 nt, Artificial Sequence
  Description of Artificial Sequence: Synthetic oligonucleotide
gaaaaggcacgcuggcuugua

SEQ ID NO: 454 - RNA, 21 nt, Artificial Sequence
  Description of Artificial Sequence: Synthetic oligonucleotide
uaguguauuguguguuuuaaa

SEQ ID NO: 455 - RNA, 21 nt, Artificial Sequence
  Description of Artificial Sequence: Synthetic oligonucleotide
ugaacauauacauagauguua

SEQ ID NO: 456 - RNA, 21 nt, Artificial Sequence
  Description of Artificial Sequence: Synthetic oligonucleotide
uguguguuuuaacaaaugaua

SEQ ID NO: 457 - RNA, 21 nt, Artificial Sequence
  Description of Artificial Sequence: Synthetic oligonucleotide
ugucugugaaugucuauauaa

SEQ ID NO: 458 - RNA, 21 nt, Artificial Sequence
  Description of Artificial Sequence: Synthetic oligonucleotide
uugaaaaggcacgcuggcuua

SEQ ID NO: 459 - RNA, 21 nt, Artificial Sequence
  Description of Artificial Sequence: Synthetic oligonucleotide
ugacucacuuuaucaauagua

SEQ ID NO: 460 - RNA, 21 nt, Artificial Sequence
  Description of Artificial Sequence: Synthetic oligonucleotide
augucuauauaguguauugua

SEQ ID NO: 461 - RNA, 21 nt, Artificial Sequence
  Description of Artificial Sequence: Synthetic oligonucleotide
guaaagagguuucuaacccaa

SEQ ID NO: 462 - RNA, 21 nt, Artificial Sequence
  Description of Artificial Sequence: Synthetic oligonucleotide
auaguguauuguguguuuuaa

SEQ ID NO: 463 - RNA, 21 nt, Artificial Sequence
  Description of Artificial Sequence: Synthetic oligonucleotide
ugaaaaggcacgcuggcuuga

SEQ ID NO: 464 - RNA, 21 nt, Artificial Sequence
  Description of Artificial Sequence: Synthetic oligonucleotide
cucauuacugccaacaguuua

SEQ ID NO: 465 - RNA, 21 nt, Artificial Sequence
  Description of Artificial Sequence: Synthetic oligonucleotide
aggcacgcuggcuugugauca

SEQ ID NO: 466 - RNA, 21 nt, Artificial Sequence
  Description of Artificial Sequence: Synthetic oligonucleotide
aaggcacgcuggcuugugaua

SEQ ID NO: 467 - RNA, 21 nt, Artificial Sequence
  Description of Artificial Sequence: Synthetic oligonucleotide
gaucaccugcgugucccauca

SEQ ID NO: 468 - RNA, 21 nt, Artificial Sequence
  Description of Artificial Sequence: Synthetic oligonucleotide
cucaccuccuaauagacuuaa

SEQ ID NO: 469 - RNA, 21 nt, Artificial Sequence
  Description of Artificial Sequence: Synthetic oligonucleotide
cagccuaagaucaugguuuaa

SEQ ID NO: 470 - RNA, 21 nt, Artificial Sequence
  Description of Artificial Sequence: Synthetic oligonucleotide
uccauacugagggugaaauua

SEQ ID NO: 471 - RNA, 21 nt, Artificial Sequence
  Description of Artificial Sequence: Synthetic oligonucleotide
ugguuuggguacaguuaaaga

SEQ ID NO: 472 - RNA, 21 nt, Artificial Sequence
  Description of Artificial Sequence: Synthetic oligonucleotide
aaaggcacgcuggcuugugaa

SEQ ID NO: 473 - RNA, 21 nt, Artificial Sequence
  Description of Artificial Sequence: Synthetic oligonucleotide
gcacgcuggcuugugaucuua

SEQ ID NO: 474 - RNA, 21 nt, Artificial Sequence
  Description of Artificial Sequence: Synthetic oligonucleotide
cugguuuggguacaguuaaaa

SEQ ID NO: 475 - RNA, 21 nt, Artificial Sequence
  Description of Artificial Sequence: Synthetic oligonucleotide
uucucuucagcuuugaaaaga

SEQ ID NO: 476 - RNA, 23 nt, Artificial Sequence
  Description of Artificial Sequence: Synthetic oligonucleotide
uuuuuacugaccaugcgagcuug

SEQ ID NO: 477 - RNA, 23 nt, Artificial Sequence
  Description of Artificial Sequence: Synthetic oligonucleotide
ucuuuuacugaccaugcgagcuu

SEQ ID NO: 478 - DNA, 23 bp, Artificial Sequence
  Description of Artificial Sequence: Synthetic oligonucleotide
  Description of Combined DNA/RNA Molecule: Synthetic oligonucleotide
uauuugtuaaaacacacaauaca

SEQ ID NO: 479 - RNA, 23 nt, Artificial Sequence
  Description of Artificial Sequence: Synthetic oligonucleotide
uuuucaaauccuuuguugcugcc

SEQ ID NO: 480 - RNA, 23 nt, Artificial Sequence
  Description of Artificial Sequence: Synthetic oligonucleotide
uuacaaagagaacugguuagccc

SEQ ID NO: 481 - RNA, 23 nt, Artificial Sequence
  Description of Artificial Sequence: Synthetic oligonucleotide
uuaaacagacaaauccaacuaca

SEQ ID NO: 482 - DNA, 23 bp, Artificial Sequence
  Description of Artificial Sequence: Synthetic oligonucleotide
  Description of Combined DNA/RNA Molecule: Synthetic oligonucleotide
ucuauatagacauucacagacag

SEQ ID NO: 483 - RNA, 23 nt, Artificial Sequence
  Description of Artificial Sequence: Synthetic oligonucleotide
ugaaucaaaaggaauugccugag

SEQ ID NO: 484 - DNA, 23 bp, Artificial Sequence
  Description of Artificial Sequence: Synthetic oligonucleotide
  Description of Combined DNA/RNA Molecule: Synthetic oligonucleotide
uaaguutcaaauccuuuguugcu

SEQ ID NO: 485 - RNA, 23 nt, Artificial Sequence
  Description of Artificial Sequence: Synthetic oligonucleotide
uuauugauaaagugagucagcag

SEQ ID NO: 486 - DNA, 23 bp, Artificial Sequence
  Description of Artificial Sequence: Synthetic oligonucleotide
  Description of Combined DNA/RNA Molecule: Synthetic oligonucleotide
ucuaugtauauguucagcugcuc

SEQ ID NO: 487 - RNA, 23 nt, Artificial Sequence
  Description of Artificial Sequence: Synthetic oligonucleotide
uuuucaagauacaugcguccuuu

SEQ ID NO: 488 - RNA, 23 nt, Artificial Sequence
  Description of Artificial Sequence: Synthetic oligonucleotide
uuuuacaagcauuucaagauaca

SEQ ID NO: 489 - RNA, 23 nt, Artificial Sequence
  Description of Artificial Sequence: Synthetic oligonucleotide
uuuacaaagagaacugguuagcc

SEQ ID NO: 490 - RNA, 23 nt, Artificial Sequence
  Description of Artificial Sequence: Synthetic oligonucleotide
uguuagaaaccucuuuacaagca

SEQ ID NO: 491 - DNA, 23 bp, Artificial Sequence
  Description of Artificial Sequence: Synthetic oligonucleotide
  Description of Combined DNA/RNA Molecule: Synthetic oligonucleotide
uuacactauauagacauucacag

SEQ ID NO: 492 - RNA, 23 nt, Artificial Sequence
  Description of Artificial Sequence: Synthetic oligonucleotide
uauauagacauucacagacagaa

SEQ ID NO: 493 - DNA, 23 bp, Artificial Sequence
  Description of Artificial Sequence: Synthetic oligonucleotide
  Description of Combined DNA/RNA Molecule: Synthetic oligonucleotide
uuaagatgauuucaugucccucc

SEQ ID NO: 494 - RNA, 23 nt, Artificial Sequence
  Description of Artificial Sequence: Synthetic oligonucleotide
uagcauaaacagacaaauccaac

SEQ ID NO: 495 - DNA, 23 bp, Artificial Sequence
  Description of Artificial Sequence: Synthetic oligonucleotide
  Description of Combined DNA/RNA Molecule: Synthetic oligonucleotide
uauguatauguucagcugcucca

SEQ ID NO: 496 - RNA, 23 nt, Artificial Sequence
  Description of Artificial Sequence: Synthetic oligonucleotide
ucaauaaaacaggguuucugugg

SEQ ID NO: 497 - RNA, 23 nt, Artificial Sequence
  Description of Artificial Sequence: Synthetic oligonucleotide
ucuuacaaagagaacugguuagc

SEQ ID NO: 498 - RNA, 23 nt, Artificial Sequence
  Description of Artificial Sequence: Synthetic oligonucleotide
uucuuuacaagcauuucaagaua

SEQ ID NO: 499 - RNA, 23 nt, Artificial Sequence
  Description of Artificial Sequence: Synthetic oligonucleotide
uguuaaaacacacaauacacuau

SEQ ID NO: 500 - RNA, 23 nt, Artificial Sequence
  Description of Artificial Sequence: Synthetic oligonucleotide
uucuauguauauguucagcugcu

SEQ ID NO: 501 - RNA, 23 nt, Artificial Sequence
  Description of Artificial Sequence: Synthetic oligonucleotide
uucaagauacaugcguccuuuuu

SEQ ID NO: 502 - DNA, 23 bp, Artificial Sequence
  Description of Artificial Sequence: Synthetic oligonucleotide
  Description of Combined DNA/RNA Molecule: Synthetic oligonucleotide
uaagcatuucaagauacaugcgu

SEQ ID NO: 503 - RNA, 23 nt, Artificial Sequence
  Description of Artificial Sequence: Synthetic oligonucleotide
uuuaagaucacaagccagcgugc

SEQ ID NO: 504 - RNA, 23 nt, Artificial Sequence
  Description of Artificial Sequence: Synthetic oligonucleotide
uguguaaaucauuuguuaaaaca

SEQ ID NO: 505 - DNA, 23 bp, Artificial Sequence
  Description of Artificial Sequence: Synthetic oligonucleotide
  Description of Combined DNA/RNA Molecule: Synthetic oligonucleotide
uucauutguuaaaacacacaaua

SEQ ID NO: 506 - RNA, 23 nt, Artificial Sequence
  Description of Artificial Sequence: Synthetic oligonucleotide
uuauagacauucacagacagaaa

SEQ ID NO: 507 - RNA, 23 nt, Artificial Sequence
  Description of Artificial Sequence: Synthetic oligonucleotide
ugaagaaaucaugggacuugcaa

SEQ ID NO: 508 - DNA, 23 bp, Artificial Sequence
  Description of Artificial Sequence: Synthetic oligonucleotide
  Description of Combined DNA/RNA Molecule: Synthetic oligonucleotide
uuaagatcacaagccagcgugcc

SEQ ID NO: 509 - RNA, 23 nt, Artificial Sequence
  Description of Artificial Sequence: Synthetic oligonucleotide
uaucauagucacucuggugaauc

SEQ ID NO: 510 - DNA, 23 bp, Artificial Sequence
  Description of Artificial Sequence: Synthetic oligonucleotide
  Description of Combined DNA/RNA Molecule: Synthetic oligonucleotide
uaacuatugauaaagugagucag

SEQ ID NO: 511 - RNA, 23 nt, Artificial Sequence
  Description of Artificial Sequence: Synthetic oligonucleotide
uuucaagauacaugcguccuuuu

SEQ ID NO: 512 - RNA, 23 nt, Artificial Sequence
  Description of Artificial Sequence: Synthetic oligonucleotide
uucaauaaaacaggguuucugug

SEQ ID NO: 513 - DNA, 23 bp, Artificial Sequence
  Description of Artificial Sequence: Synthetic oligonucleotide
  Description of Combined DNA/RNA Molecule: Synthetic oligonucleotide
ucacuatauagacauucacagac

SEQ ID NO: 514 - RNA, 23 nt, Artificial Sequence
  Description of Artificial Sequence: Synthetic oligonucleotide
uaauacacuauauagacauucac

SEQ ID NO: 515 - RNA, 23 nt, Artificial Sequence
  Description of Artificial Sequence: Synthetic oligonucleotide
uuuagaaaccucuuuacaagcau

SEQ ID NO: 516 - DNA, 23 bp, Artificial Sequence
  Description of Artificial Sequence: Synthetic oligonucleotide
  Description of Combined DNA/RNA Molecule: Synthetic oligonucleotide
uuaagctaagaugauuucauguc

SEQ ID NO: 517 - RNA, 23 nt, Artificial Sequence
  Description of Artificial Sequence: Synthetic oligonucleotide
uggguuagaaaccucuuuacaag

SEQ ID NO: 518 - RNA, 23 nt, Artificial Sequence
  Description of Artificial Sequence: Synthetic oligonucleotide
ucauuucaagauacaugcguccu

SEQ ID NO: 519 - DNA, 23 bp, Artificial Sequence
  Description of Artificial Sequence: Synthetic oligonucleotide
  Description of Combined DNA/RNA Molecule: Synthetic oligonucleotide
uagaaatcaugggacuugcaagu

SEQ ID NO: 520 - RNA, 23 nt, Artificial Sequence
  Description of Artificial Sequence: Synthetic oligonucleotide
uuucaaauccuuuguugcugcca

SEQ ID NO: 521 - RNA, 23 nt, Artificial Sequence
  Description of Artificial Sequence: Synthetic oligonucleotide
uaagaugauuucaugucccuccc

SEQ ID NO: 522 - DNA, 23 bp, Artificial Sequence
  Description of Artificial Sequence: Synthetic oligonucleotide
  Description of Combined DNA/RNA Molecule: Synthetic oligonucleotide
uuacagtauauccuaucuagccc

SEQ ID NO: 523 - RNA, 23 nt, Artificial Sequence
  Description of Artificial Sequence: Synthetic oligonucleotide
uacaguauauccuaucuagccca

SEQ ID NO: 524 - RNA, 23 nt, Artificial Sequence
  Description of Artificial Sequence: Synthetic oligonucleotide
uggguggguuagaaaccucuuua

SEQ ID NO: 525 - RNA, 23 nt, Artificial Sequence
  Description of Artificial Sequence: Synthetic oligonucleotide
uaaauccuuuguugcugccacug

SEQ ID NO: 526 - RNA, 23 nt, Artificial Sequence
  Description of Artificial Sequence: Synthetic oligonucleotide
uacuauauagacauucacagaca

SEQ ID NO: 527 - RNA, 23 nt, Artificial Sequence
  Description of Artificial Sequence: Synthetic oligonucleotide
ucauaaacagacaaauccaacua

SEQ ID NO: 528 - RNA, 23 nt, Artificial Sequence
  Description of Artificial Sequence: Synthetic oligonucleotide
uuguauauguucagcugcuccag

SEQ ID NO: 529 - RNA, 23 nt, Artificial Sequence
  Description of Artificial Sequence: Synthetic oligonucleotide
ucuuuacaagcauuucaagauac

SEQ ID NO: 530 - RNA, 23 nt, Artificial Sequence
  Description of Artificial Sequence: Synthetic oligonucleotide
ucacaagccagcgugccuuuuca

SEQ ID NO: 531 - DNA, 23 bp, Artificial Sequence
  Description of Artificial Sequence: Synthetic oligonucleotide
  Description of Combined DNA/RNA Molecule: Synthetic oligonucleotide
uuaauutcacccucaguauggag

SEQ ID NO: 532 - RNA, 23 nt, Artificial Sequence
  Description of Artificial Sequence: Synthetic oligonucleotide
ucuauugauaaagugagucagca

SEQ ID NO: 533 - RNA, 23 nt, Artificial Sequence
  Description of Artificial Sequence: Synthetic oligonucleotide
uuaacuguacccaaaccagaagu

SEQ ID NO: 534 - RNA, 23 nt, Artificial Sequence
  Description of Artificial Sequence: Synthetic oligonucleotide
uacacuauauagacauucacaga

SEQ ID NO: 535 - RNA, 23 nt, Artificial Sequence
  Description of Artificial Sequence: Synthetic oligonucleotide
uuaaaacaggguuucuguggagc

SEQ ID NO: 536 - RNA, 23 nt, Artificial Sequence
  Description of Artificial Sequence: Synthetic oligonucleotide
uuagcaaaugugguugaaaucau

SEQ ID NO: 537 - RNA, 23 nt, Artificial Sequence
  Description of Artificial Sequence: Synthetic oligonucleotide
uauagacauucacagacagaaag

SEQ ID NO: 538 - DNA, 23 bp, Artificial Sequence
  Description of Artificial Sequence: Synthetic oligonucleotide
  Description of Combined DNA/RNA Molecule: Synthetic oligonucleotide
uuuaactguacccaaaccagaag

SEQ ID NO: 539 - DNA, 23 bp, Artificial Sequence
  Description of Artificial Sequence: Synthetic oligonucleotide
  Description of Combined DNA/RNA Molecule: Synthetic oligonucleotide
uuuaautucacccucaguaugga

SEQ ID NO: 540 - RNA, 23 nt, Artificial Sequence
  Description of Artificial Sequence: Synthetic oligonucleotide
uagaucacaagccagcgugccuu

SEQ ID NO: 541 - RNA, 23 nt, Artificial Sequence
  Description of Artificial Sequence: Synthetic oligonucleotide
uacaagccagcgugccuuuucaa

SEQ ID NO: 542 - RNA, 23 nt, Artificial Sequence
  Description of Artificial Sequence: Synthetic oligonucleotide
uuuaaaacacacaauacacuaua

SEQ ID NO: 543 - RNA, 23 nt, Artificial Sequence
  Description of Artificial Sequence: Synthetic oligonucleotide
uaacaucuauguauauguucagc

SEQ ID NO: 544 - DNA, 23 bp, Artificial Sequence
  Description of Artificial Sequence: Synthetic oligonucleotide
  Description of Combined DNA/RNA Molecule: Synthetic oligonucleotide
uaucautuguuaaaacacacaau

SEQ ID NO: 545 - RNA, 23 nt, Artificial Sequence
  Description of Artificial Sequence: Synthetic oligonucleotide
uuauauagacauucacagacaga

SEQ ID NO: 546 - RNA, 23 nt, Artificial Sequence
  Description of Artificial Sequence: Synthetic oligonucleotide
uaagccagcgugccuuuucaauu

SEQ ID NO: 547 - DNA, 23 bp, Artificial Sequence
  Description of Artificial Sequence: Synthetic oligonucleotide
  Description of Combined DNA/RNA Molecule: Synthetic oligonucleotide
uacuautgauaaagugagucagc

SEQ ID NO: 548 - RNA, 23 nt, Artificial Sequence
  Description of Artificial Sequence: Synthetic oligonucleotide
uacaauacacuauauagacauuc

SEQ ID NO: 549 - DNA, 23 bp, Artificial Sequence
  Description of Artificial Sequence: Synthetic oligonucleotide
  Description of Combined DNA/RNA Molecule: Synthetic oligonucleotide
uugggutagaaaccucuuuacaa

SEQ ID NO: 550 - RNA, 23 nt, Artificial Sequence
  Description of Artificial Sequence: Synthetic oligonucleotide
uuaaaacacacaauacacuauau

SEQ ID NO: 551 - RNA, 23 nt, Artificial Sequence
  Description of Artificial Sequence: Synthetic oligonucleotide
ucaagccagcgugccuuuucaau

SEQ ID NO: 552 - RNA, 23 nt, Artificial Sequence
  Description of Artificial Sequence: Synthetic oligonucleotide
uaaacuguuggcaguaaugaggg

SEQ ID NO: 553 - RNA, 23 nt, Artificial Sequence
  Description of Artificial Sequence: Synthetic oligonucleotide
ugaucacaagccagcgugccuuu

SEQ ID NO: 554 - RNA, 23 nt, Artificial Sequence
  Description of Artificial Sequence: Synthetic oligonucleotide
uaucacaagccagcgugccuuuu

SEQ ID NO: 555 - RNA, 23 nt, Artificial Sequence
  Description of Artificial Sequence: Synthetic oligonucleotide
ugaugggacacgcaggugaucac

SEQ ID NO: 556 - RNA, 23 nt, Artificial Sequence
  Description of Artificial Sequence: Synthetic oligonucleotide
uuaagucuauuaggaggugaggc

SEQ ID NO: 557 - RNA, 23 nt, Artificial Sequence
  Description of Artificial Sequence: Synthetic oligonucleotide
uuaaaccaugaucuuaggcuggc

SEQ ID NO: 558 - RNA, 23 nt, Artificial Sequence
  Description of Artificial Sequence: Synthetic oligonucleotide
uaauuucacccucaguauggagu

SEQ ID NO: 559 - RNA, 23 nt, Artificial Sequence
  Description of Artificial Sequence: Synthetic oligonucleotide
ucuuuaacuguacccaaaccaga

SEQ ID NO: 560 - RNA, 23 nt, Artificial Sequence
  Description of Artificial Sequence: Synthetic oligonucleotide
uucacaagccagcgugccuuuuc

SEQ ID NO: 561 - RNA, 23 nt, Artificial Sequence
  Description of Artificial Sequence: Synthetic oligonucleotide
uaagaucacaagccagcgugccu

SEQ ID NO: 562 - RNA, 23 nt, Artificial Sequence
  Description of Artificial Sequence: Synthetic oligonucleotide
uuuuaacuguacccaaaccagaa

SEQ ID NO: 563 - RNA, 23 nt, Artificial Sequence
  Description of Artificial Sequence: Synthetic oligonucleotide
ucuuuucaaagcugaagagaaau

SEQ ID NO: 564 - RNA, 21 nt, Artificial Sequence
  Description of Artificial Sequence: Synthetic oligonucleotide
agcucgcauggucaguaaaaa

SEQ ID NO: 565 - RNA, 21 nt, Artificial Sequence
  Description of Artificial Sequence: Synthetic oligonucleotide
gcucgcauggucaguaaaaga

SEQ ID NO: 566 - RNA, 21 nt, Artificial Sequence
  Description of Artificial Sequence: Synthetic oligonucleotide
uauuguguguuuuaacaaaua

SEQ ID NO: 567 - RNA, 21 nt, Artificial Sequence
  Description of Artificial Sequence: Synthetic oligonucleotide
cagcaacaaaggauuugaaaa

SEQ ID NO: 568 - RNA, 21 nt, Artificial Sequence
  Description of Artificial Sequence: Synthetic oligonucleotide
gcuaaccaguucucuuuguaa

SEQ ID NO: 569 - RNA, 21 nt, Artificial Sequence
  Description of Artificial Sequence: Synthetic oligonucleotide
uaguuggauuugucuguuuaa

SEQ ID NO: 570 - RNA, 21 nt, Artificial Sequence
  Description of Artificial Sequence: Synthetic oligonucleotide
gucugugaaugucuauauaga

SEQ ID NO: 571 - RNA, 21 nt, Artificial Sequence
  Description of Artificial Sequence: Synthetic oligonucleotide
caggcaauuccuuuugauuca

SEQ ID NO: 572 - RNA, 21 nt, Artificial Sequence
  Description of Artificial Sequence: Synthetic oligonucleotide
caacaaaggauuugaaacuua

SEQ ID NO: 573 - RNA, 21 nt, Artificial Sequence
  Description of Artificial Sequence: Synthetic oligonucleotide
gcugacucacuuuaucaauaa

SEQ ID NO: 574 - RNA, 21 nt, Artificial Sequence
  Description of Artificial Sequence: Synthetic oligonucleotide
gcagcugaacauauacauaga

SEQ ID NO: 575 - RNA, 21 nt, Artificial Sequence
  Description of Artificial Sequence: Synthetic oligonucleotide
aggacgcauguaucuugaaaa

SEQ ID NO: 576 - RNA, 21 nt, Artificial Sequence
  Description of Artificial Sequence: Synthetic oligonucleotide
uaucuugaaaugcuuguaaaa

SEQ ID NO: 577 - RNA, 21 nt, Artificial Sequence
  Description of Artificial Sequence: Synthetic oligonucleotide
cuaaccaguucucuuuguaaa

SEQ ID NO: 578 - RNA, 21 nt, Artificial Sequence
  Description of Artificial Sequence: Synthetic oligonucleotide
cuuguaaagagguuucuaaca

SEQ ID NO: 579 - RNA, 21 nt, Artificial Sequence
  Description of Artificial Sequence: Synthetic oligonucleotide
gugaaugucuauauaguguaa

SEQ ID NO: 580 - RNA, 21 nt, Artificial Sequence
  Description of Artificial Sequence: Synthetic oligonucleotide
cugucugugaaugucuauaua

SEQ ID NO: 581 - RNA, 21 nt, Artificial Sequence
  Description of Artificial Sequence: Synthetic oligonucleotide
agggacaugaaaucaucuuaa

SEQ ID NO: 582 - RNA, 21 nt, Artificial Sequence
  Description of Artificial Sequence: Synthetic oligonucleotide
uggauuugucuguuuaugcua

SEQ ID NO: 583 - RNA, 21 nt, Artificial Sequence
  Description of Artificial Sequence: Synthetic oligonucleotide
gagcagcugaacauauacaua

SEQ ID NO: 584 - RNA, 21 nt, Artificial Sequence
  Description of Artificial Sequence: Synthetic oligonucleotide
acagaaacccuguuuuauuga

SEQ ID NO: 585 - RNA, 21 nt, Artificial Sequence
  Description of Artificial Sequence: Synthetic oligonucleotide
uaaccaguucucuuuguaaga

SEQ ID NO: 586 - RNA, 21 nt, Artificial Sequence
  Description of Artificial Sequence: Synthetic oligonucleotide
ucuugaaaugcuuguaaagaa

SEQ ID NO: 587 - RNA, 21 nt, Artificial Sequence
  Description of Artificial Sequence: Synthetic oligonucleotide
aguguauuguguguuuuaaca

SEQ ID NO: 588 - RNA, 21 nt, Artificial Sequence
  Description of Artificial Sequence: Synthetic oligonucleotide
cagcugaacauauacauagaa

SEQ ID NO: 589 - RNA, 21 nt, Artificial Sequence
  Description of Artificial Sequence: Synthetic oligonucleotide
aaaggacgcauguaucuugaa

SEQ ID NO: 590 - RNA, 21 nt, Artificial Sequence
  Description of Artificial Sequence: Synthetic oligonucleotide
gcauguaucuugaaaugcuua

SEQ ID NO: 591 - RNA, 21 nt, Artificial Sequence
  Description of Artificial Sequence: Synthetic oligonucleotide
acgcuggcuugugaucuuaaa

SEQ ID NO: 592 - RNA, 21 nt, Artificial Sequence
  Description of Artificial Sequence: Synthetic oligonucleotide
uuuuaacaaaugauuuacaca

SEQ ID NO: 593 - RNA, 21 nt, Artificial Sequence
  Description of Artificial Sequence: Synthetic oligonucleotide
uuguguguuuuaacaaaugaa

SEQ ID NO: 594 - RNA, 21 nt, Artificial Sequence
  Description of Artificial Sequence: Synthetic oligonucleotide
ucugucugugaaugucuauaa

SEQ ID NO: 595 - RNA, 21 nt, Artificial Sequence
  Description of Artificial Sequence: Synthetic oligonucleotide
gcaagucccaugauuucuuca

SEQ ID NO: 596 - RNA, 21 nt, Artificial Sequence
  Description of Artificial Sequence: Synthetic oligonucleotide
cacgcuggcuugugaucuuaa

SEQ ID NO: 597 - RNA, 21 nt, Artificial Sequence
  Description of Artificial Sequence: Synthetic oligonucleotide
uucaccagagugacuaugaua

SEQ ID NO: 598 - RNA, 21 nt, Artificial Sequence
  Description of Artificial Sequence: Synthetic oligonucleotide
gacucacuuuaucaauaguua

SEQ ID NO: 599 - RNA, 21 nt, Artificial Sequence
  Description of Artificial Sequence: Synthetic oligonucleotide
aaggacgcauguaucuugaaa

SEQ ID NO: 600 - RNA, 21 nt, Artificial Sequence
  Description of Artificial Sequence: Synthetic oligonucleotide
cagaaacccuguuuuauugaa

SEQ ID NO: 601 - RNA, 21 nt, Artificial Sequence
  Description of Artificial Sequence: Synthetic oligonucleotide
cugugaaugucuauauaguga

SEQ ID NO: 602 - RNA, 21 nt, Artificial Sequence
  Description of Artificial Sequence: Synthetic oligonucleotide
gaaugucuauauaguguauua

SEQ ID NO: 603 - RNA, 21 nt, Artificial Sequence
  Description of Artificial Sequence: Synthetic oligonucleotide
gcuuguaaagagguuucuaaa

SEQ ID NO: 604 - RNA, 21 nt, Artificial Sequence
  Description of Artificial Sequence: Synthetic oligonucleotide
caugaaaucaucuuagcuuaa

SEQ ID NO: 605 - RNA, 21 nt, Artificial Sequence
  Description of Artificial Sequence: Synthetic oligonucleotide
uguaaagagguuucuaaccca

SEQ ID NO: 606 - RNA, 21 nt, Artificial Sequence
  Description of Artificial Sequence: Synthetic oligonucleotide
gacgcauguaucuugaaauga

SEQ ID NO: 607 - RNA, 21 nt, Artificial Sequence
  Description of Artificial Sequence: Synthetic oligonucleotide
uugcaagucccaugauuucua

SEQ ID NO: 608 - RNA, 21 nt, Artificial Sequence
  Description of Artificial Sequence: Synthetic oligonucleotide
gcagcaacaaaggauuugaaa

SEQ ID NO: 609 - RNA, 21 nt, Artificial Sequence
  Description of Artificial Sequence: Synthetic oligonucleotide
gagggacaugaaaucaucuua

SEQ ID NO: 610 - RNA, 21 nt, Artificial Sequence
  Description of Artificial Sequence: Synthetic oligonucleotide
gcuagauaggauauacuguaa

SEQ ID NO: 611 - RNA, 21 nt, Artificial Sequence
  Description of Artificial Sequence: Synthetic oligonucleotide
ggcuagauaggauauacugua

SEQ ID NO: 612 - RNA, 21 nt, Artificial Sequence
  Description of Artificial Sequence: Synthetic oligonucleotide
aagagguuucuaacccaccca

SEQ ID NO: 613 - RNA, 21 nt, Artificial Sequence
  Description of Artificial Sequence: Synthetic oligonucleotide
guggcagcaacaaaggauuua

SEQ ID NO: 614 - RNA, 21 nt, Artificial Sequence
  Description of Artificial Sequence: Synthetic oligonucleotide
ucugugaaugucuauauagua

SEQ ID NO: 615 - RNA, 21 nt, Artificial Sequence
  Description of Artificial Sequence: Synthetic oligonucleotide
guuggauuugucuguuuauga

SEQ ID NO: 616 - RNA, 21 nt, Artificial Sequence
  Description of Artificial Sequence: Synthetic oligonucleotide
ggagcagcugaacauauacaa

SEQ ID NO: 617 - RNA, 21 nt, Artificial Sequence
  Description of Artificial Sequence: Synthetic oligonucleotide
aucuugaaaugcuuguaaaga

SEQ ID NO: 618 - RNA, 21 nt, Artificial Sequence
  Description of Artificial Sequence: Synthetic oligonucleotide
aaaaggcacgcuggcuuguga

SEQ ID NO: 619 - RNA, 21 nt, Artificial Sequence
  Description of Artificial Sequence: Synthetic oligonucleotide
ccauacugagggugaaauuaa

SEQ ID NO: 620 - RNA, 21 nt, Artificial Sequence
  Description of Artificial Sequence: Synthetic oligonucleotide
cugacucacuuuaucaauaga

SEQ ID NO: 621 - RNA, 21 nt, Artificial Sequence
  Description of Artificial Sequence: Synthetic oligonucleotide
uucugguuuggguacaguuaa

SEQ ID NO: 622 - RNA, 21 nt, Artificial Sequence
  Description of Artificial Sequence: Synthetic oligonucleotide
ugugaaugucuauauagugua

SEQ ID NO: 623 - RNA, 21 nt, Artificial Sequence
  Description of Artificial Sequence: Synthetic oligonucleotide
uccacagaaacccuguuuuaa

SEQ ID NO: 624 - RNA, 21 nt, Artificial Sequence
  Description of Artificial Sequence: Synthetic oligonucleotide
gauuucaaccacauuugcuaa

SEQ ID NO: 625 - RNA, 21 nt, Artificial Sequence
  Description of Artificial Sequence: Synthetic oligonucleotide
uucugucugugaaugucuaua

SEQ ID NO: 626 - RNA, 21 nt, Artificial Sequence
  Description of Artificial Sequence: Synthetic oligonucleotide
ucugguuuggguacaguuaaa

SEQ ID NO: 627 - RNA, 21 nt, Artificial Sequence
  Description of Artificial Sequence: Synthetic oligonucleotide
cauacugagggugaaauuaaa

SEQ ID NO: 628 - RNA, 21 nt, Artificial Sequence
  Description of Artificial Sequence: Synthetic oligonucleotide
ggcacgcuggcuugugaucua

SEQ ID NO: 629 - RNA, 21 nt, Artificial Sequence
  Description of Artificial Sequence: Synthetic oligonucleotide
gaaaaggcacgcuggcuugua

SEQ ID NO: 630 - RNA, 21 nt, Artificial Sequence
  Description of Artificial Sequence: Synthetic oligonucleotide
uaguguauuguguguuuuaaa

SEQ ID NO: 631 - RNA, 21 nt, Artificial Sequence
  Description of Artificial Sequence: Synthetic oligonucleotide
ugaacauauacauagauguua

SEQ ID NO: 632 - RNA, 21 nt, Artificial Sequence
  Description of Artificial Sequence: Synthetic oligonucleotide
uguguguuuuaacaaaugaua

SEQ ID NO: 633 - RNA, 21 nt, Artificial Sequence
  Description of Artificial Sequence: Synthetic oligonucleotide
ugucugugaaugucuauauaa

SEQ ID NO: 634 - RNA, 21 nt, Artificial Sequence
  Description of Artificial Sequence: Synthetic oligonucleotide
uugaaaaggcacgcuggcuua

SEQ ID NO: 635 - RNA, 21 nt, Artificial Sequence
  Description of Artificial Sequence: Synthetic oligonucleotide
ugacucacuuuaucaauagua

SEQ ID NO: 636 - RNA, 21 nt, Artificial Sequence
  Description of Artificial Sequence: Synthetic oligonucleotide
augucuauauaguguauugua

SEQ ID NO: 637 - RNA, 21 nt, Artificial Sequence
  Description of Artificial Sequence: Synthetic oligonucleotide
guaaagagguuucuaacccaa

SEQ ID NO: 638 - RNA, 21 nt, Artificial Sequence
  Description of Artificial Sequence: Synthetic oligonucleotide
auaguguauuguguguuuuaa

SEQ ID NO: 639 - RNA, 21 nt, Artificial Sequence
  Description of Artificial Sequence: Synthetic oligonucleotide
ugaaaaggcacgcuggcuuga

SEQ ID NO: 640 - RNA, 21 nt, Artificial Sequence
  Description of Artificial Sequence: Synthetic oligonucleotide
cucauuacugccaacaguuua

SEQ ID NO: 641 - RNA, 21 nt, Artificial Sequence
  Description of Artificial Sequence: Synthetic oligonucleotide
aggcacgcuggcuugugauca

SEQ ID NO: 642 - RNA, 21 nt, Artificial Sequence
  Description of Artificial Sequence: Synthetic oligonucleotide
aaggcacgcuggcuugugaua

SEQ ID NO: 643 - RNA, 21 nt, Artificial Sequence
  Description of Artificial Sequence: Synthetic oligonucleotide
gaucaccugcgugucccauca

SEQ ID NO: 644 - RNA, 21 nt, Artificial Sequence
  Description of Artificial Sequence: Synthetic oligonucleotide
cucaccuccuaauagacuuaa

SEQ ID NO: 645 - RNA, 21 nt, Artificial Sequence
  Description of Artificial Sequence: Synthetic oligonucleotide
cagccuaagaucaugguuuaa

SEQ ID NO: 646 - RNA, 21 nt, Artificial Sequence
  Description of Artificial Sequence: Synthetic oligonucleotide
uccauacugagggugaaauua

SEQ ID NO: 647 - RNA, 21 nt, Artificial Sequence
  Description of Artificial Sequence: Synthetic oligonucleotide
ugguuuggguacaguuaaaga

SEQ ID NO: 648 - RNA, 21 nt, Artificial Sequence
  Description of Artificial Sequence: Synthetic oligonucleotide
aaaggcacgcuggcuugugaa

SEQ ID NO: 649 - RNA, 21 nt, Artificial Sequence
  Description of Artificial Sequence: Synthetic oligonucleotide
gcacgcuggcuugugaucuua

SEQ ID NO: 650 - RNA, 21 nt, Artificial Sequence
  Description of Artificial Sequence: Synthetic oligonucleotide
cugguuuggguacaguuaaaa

SEQ ID NO: 651 - RNA, 21 nt, Artificial Sequence
  Description of Artificial Sequence: Synthetic oligonucleotide
uucucuucagcuuugaaaaga

SEQ ID NO: 652 - RNA, 23 nt, Artificial Sequence
  Description of Artificial Sequence: Synthetic oligonucleotide
uuuuuacugaccaugcgagcuug

SEQ ID NO: 653 - RNA, 23 nt, Artificial Sequence
  Description of Artificial Sequence: Synthetic oligonucleotide
ucuuuuacugaccaugcgagcuu

SEQ ID NO: 654 - DNA, 23 bp, Artificial Sequence
  Description of Artificial Sequence: Synthetic oligonucleotide
  Description of Combined DNA/RNA Molecule: Synthetic oligonucleotide
uauuugtuaaaacacacaauaca

SEQ ID NO: 655 - RNA, 23 nt, Artificial Sequence
  Description of Artificial Sequence: Synthetic oligonucleotide
uuuucaaauccuuuguugcugcc

SEQ ID NO: 656 - RNA, 23 nt, Artificial Sequence
  Description of Artificial Sequence: Synthetic oligonucleotide
uuacaaagagaacugguuagccc

SEQ ID NO: 657 - RNA, 23 nt, Artificial Sequence
  Description of Artificial Sequence: Synthetic oligonucleotide
uuaaacagacaaauccaacuaca

SEQ ID NO: 658 - DNA, 23 bp, Artificial Sequence
  Description of Artificial Sequence: Synthetic oligonucleotide
  Description of Combined DNA/RNA Molecule: Synthetic oligonucleotide
ucuauatagacauucacagacag

SEQ ID NO: 659 - RNA, 23 nt, Artificial Sequence
  Description of Artificial Sequence: Synthetic oligonucleotide
ugaaucaaaaggaauugccugag

SEQ ID NO: 660 - DNA, 23 bp, Artificial Sequence
  Description of Artificial Sequence: Synthetic oligonucleotide
  Description of Combined DNA/RNA Molecule: Synthetic oligonucleotide
uaaguutcaaauccuuuguugcu

SEQ ID NO: 661 - RNA, 23 nt, Artificial Sequence
  Description of Artificial Sequence: Synthetic oligonucleotide
uuauugauaaagugagucagcag

SEQ ID NO: 662 - DNA, 23 bp, Artificial Sequence
  Description of Artificial Sequence: Synthetic oligonucleotide
  Description of Combined DNA/RNA Molecule: Synthetic oligonucleotide
ucuaugtauauguucagcugcuc

SEQ ID NO: 663 - RNA, 23 nt, Artificial Sequence
  Description of Artificial Sequence: Synthetic oligonucleotide
uuuucaagauacaugcguccuuu

SEQ ID NO: 664 - RNA, 23 nt, Artificial Sequence
  Description of Artificial Sequence: Synthetic oligonucleotide
uuuuacaagcauuucaagauaca

SEQ ID NO: 665 - RNA, 23 nt, Artificial Sequence
  Description of Artificial Sequence: Synthetic oligonucleotide
uuuacaaagagaacugguuagcc

SEQ ID NO: 666 - RNA, 23 nt, Artificial Sequence
  Description of Artificial Sequence: Synthetic oligonucleotide
uguuagaaaccucuuuacaagca

SEQ ID NO: 667 - DNA, 23 bp, Artificial Sequence
  Description of Artificial Sequence: Synthetic oligonucleotide
  Description of Combined DNA/RNA Molecule: Synthetic oligonucleotide
uuacactauauagacauucacag

SEQ ID NO: 668 - RNA, 23 nt, Artificial Sequence
  Description of Artificial Sequence: Synthetic oligonucleotide
uauauagacauucacagacagaa

SEQ ID NO: 669 - DNA, 23 bp, Artificial Sequence
  Description of Artificial Sequence: Synthetic oligonucleotide
  Description of Combined DNA/RNA Molecule: Synthetic oligonucleotide
uuaagatgauuucaugucccucc

SEQ ID NO: 670 - RNA, 23 nt, Artificial Sequence
  Description of Artificial Sequence: Synthetic oligonucleotide
uagcauaaacagacaaauccaac

SEQ ID NO: 671 - DNA, 23 bp, Artificial Sequence
  Description of Artificial Sequence: Synthetic oligonucleotide
  Description of Combined DNA/RNA Molecule: Synthetic oligonucleotide
uauguatauguucagcugcucca

SEQ ID NO: 672 - RNA, 23 nt, Artificial Sequence
  Description of Artificial Sequence: Synthetic oligonucleotide
ucaauaaaacaggguuucugugg

SEQ ID NO: 673 - RNA, 23 nt, Artificial Sequence
  Description of Artificial Sequence: Synthetic oligonucleotide
ucuuacaaagagaacugguuagc

SEQ ID NO: 674 - RNA, 23 nt, Artificial Sequence
  Description of Artificial Sequence: Synthetic oligonucleotide
uucuuuacaagcauuucaagaua

SEQ ID NO: 675 - RNA, 23 nt, Artificial Sequence
  Description of Artificial Sequence: Synthetic oligonucleotide
uguuaaaacacacaauacacuau

SEQ ID NO: 676 - RNA, 23 nt, Artificial Sequence
  Description of Artificial Sequence: Synthetic oligonucleotide
uucuauguauauguucagcugcu

SEQ ID NO: 677 - RNA, 23 nt, Artificial Sequence
  Description of Artificial Sequence: Synthetic oligonucleotide
uucaagauacaugcguccuuuuu

SEQ ID NO: 678 - DNA, 23 bp, Artificial Sequence
  Description of Artificial Sequence: Synthetic oligonucleotide
  Description of Combined DNA/RNA Molecule: Synthetic oligonucleotide
uaagcatuucaagauacaugcgu

SEQ ID NO: 679 - RNA, 23 nt, Artificial Sequence
  Description of Artificial Sequence: Synthetic oligonucleotide
uuuaagaucacaagccagcgugc

SEQ ID NO: 680 - RNA, 23 nt, Artificial Sequence
  Description of Artificial Sequence: Synthetic oligonucleotide
uguguaaaucauuuguuaaaaca

SEQ ID NO: 681 - DNA, 23 bp, Artificial Sequence
  Description of Artificial Sequence: Synthetic oligonucleotide
  Description of Combined DNA/RNA Molecule: Synthetic oligonucleotide
uucauutguuaaaacacacaaua

SEQ ID NO: 682 - RNA, 23 nt, Artificial Sequence
  Description of Artificial Sequence: Synthetic oligonucleotide
uuauagacauucacagacagaaa

SEQ ID NO: 683 - RNA, 23 nt, Artificial Sequence
  Description of Artificial Sequence: Synthetic oligonucleotide
ugaagaaaucaugggacuugcaa

SEQ ID NO: 684 - DNA, 23 bp, Artificial Sequence
  Description of Artificial Sequence: Synthetic oligonucleotide
  Description of Combined DNA/RNA Molecule: Synthetic oligonucleotide
uuaagatcacaagccagcgugcc

SEQ ID NO: 685 - RNA, 23 nt, Artificial Sequence
  Description of Artificial Sequence: Synthetic oligonucleotide
uaucauagucacucuggugaauc

SEQ ID NO: 686 - DNA, 23 bp, Artificial Sequence
  Description of Artificial Sequence: Synthetic oligonucleotide
  Description of Combined DNA/RNA Molecule: Synthetic oligonucleotide
uaacuatugauaaagugagucag

SEQ ID NO: 687 - RNA, 23 nt, Artificial Sequence
  Description of Artificial Sequence: Synthetic oligonucleotide
uuucaagauacaugcguccuuuu

SEQ ID NO: 688 - RNA, 23 nt, Artificial Sequence
  Description of Artificial Sequence: Synthetic oligonucleotide
uucaauaaaacaggguuucugug

SEQ ID NO: 689 - DNA, 23 bp, Artificial Sequence
  Description of Artificial Sequence: Synthetic oligonucleotide
  Description of Combined DNA/RNA Molecule: Synthetic oligonucleotide
ucacuatauagacauucacagac

SEQ ID NO: 690 - RNA, 23 nt, Artificial Sequence
  Description of Artificial Sequence: Synthetic oligonucleotide
uaauacacuauauagacauucac

SEQ ID NO: 691 - RNA, 23 nt, Artificial Sequence
  Description of Artificial Sequence: Synthetic oligonucleotide
uuuagaaaccucuuuacaagcau

SEQ ID NO: 692 - DNA, 23 bp, Artificial Sequence
  Description of Artificial Sequence: Synthetic oligonucleotide
  Description of Combined DNA/RNA Molecule: Synthetic oligonucleotide
uuaagctaagaugauuucauguc

SEQ ID NO: 693 - RNA, 23 nt, Artificial Sequence
  Description of Artificial Sequence: Synthetic oligonucleotide
uggguuagaaaccucuuuacaag

SEQ ID NO: 694 - RNA, 23 nt, Artificial Sequence
  Description of Artificial Sequence: Synthetic oligonucleotide
ucauuucaagauacaugcguccu

SEQ ID NO: 695 - DNA, 23 bp, Artificial Sequence
  Description of Artificial Sequence: Synthetic oligonucleotide
  Description of Combined DNA/RNA Molecule: Synthetic oligonucleotide
uagaaatcaugggacuugcaagu

SEQ ID NO: 696 - RNA, 23 nt, Artificial Sequence
  Description of Artificial Sequence: Synthetic oligonucleotide
uuucaaauccuuuguugcugcca

SEQ ID NO: 697 - RNA, 23 nt, Artificial Sequence
  Description of Artificial Sequence: Synthetic oligonucleotide
uaagaugauuucaugucccuccc

SEQ ID NO: 698 - DNA, 23 bp, Artificial Sequence
  Description of Artificial Sequence: Synthetic oligonucleotide
  Description of Combined DNA/RNA Molecule: Synthetic oligonucleotide
uuacagtauauccuaucuagccc

SEQ ID NO: 699 - RNA, 23 nt, Artificial Sequence
  Description of Artificial Sequence: Synthetic oligonucleotide
uacaguauauccuaucuagccca

SEQ ID NO: 700 - RNA, 23 nt, Artificial Sequence
  Description of Artificial Sequence: Synthetic oligonucleotide
uggguggguuagaaaccucuuua

SEQ ID NO: 701 - RNA, 23 nt, Artificial Sequence
  Description of Artificial Sequence: Synthetic oligonucleotide
uaaauccuuuguugcugccacug

SEQ ID NO: 702 - RNA, 23 nt, Artificial Sequence
  Description of Artificial Sequence: Synthetic oligonucleotide
uacuauauagacauucacagaca

SEQ ID NO: 703 - RNA, 23 nt, Artificial Sequence
  Description of Artificial Sequence: Synthetic oligonucleotide
ucauaaacagacaaauccaacua

SEQ ID NO: 704 - RNA, 23 nt, Artificial Sequence
  Description of Artificial Sequence: Synthetic oligonucleotide
uuguauauguucagcugcuccag

SEQ ID NO: 705 - RNA, 23 nt, Artificial Sequence
  Description of Artificial Sequence: Synthetic oligonucleotide
ucuuuacaagcauuucaagauac

SEQ ID NO: 706 - RNA, 23 nt, Artificial Sequence
  Description of Artificial Sequence: Synthetic oligonucleotide
ucacaagccagcgugccuuuuca

SEQ ID NO: 707 - DNA, 23 bp, Artificial Sequence
  Description of Artificial Sequence: Synthetic oligonucleotide
  Description of Combined DNA/RNA Molecule: Synthetic oligonucleotide
uuaauutcacccucaguauggag

SEQ ID NO: 708 - RNA, 23 nt, Artificial Sequence
  Description of Artificial Sequence: Synthetic oligonucleotide
ucuauugauaaagugagucagca

SEQ ID NO: 709 - RNA, 23 nt, Artificial Sequence
  Description of Artificial Sequence: Synthetic oligonucleotide
uuaacuguacccaaaccagaagu

SEQ ID NO: 710 - RNA, 23 nt, Artificial Sequence
  Description of Artificial Sequence: Synthetic oligonucleotide
uacacuauauagacauucacaga

SEQ ID NO: 711 - RNA, 23 nt, Artificial Sequence
  Description of Artificial Sequence: Synthetic oligonucleotide
uuaaaacaggguuucuguggagc

SEQ ID NO: 712 - RNA, 23 nt, Artificial Sequence
  Description of Artificial Sequence: Synthetic oligonucleotide
uuagcaaaugugguugaaaucau

SEQ ID NO: 713 - RNA, 23 nt, Artificial Sequence
  Description of Artificial Sequence: Synthetic oligonucleotide
uauagacauucacagacagaaag

SEQ ID NO: 714 - DNA, 23 bp, Artificial Sequence
  Description of Artificial Sequence: Synthetic oligonucleotide
  Description of Combined DNA/RNA Molecule: Synthetic oligonucleotide
uuuaactguacccaaaccagaag

SEQ ID NO: 715 - DNA, 23 bp, Artificial Sequence
  Description of Artificial Sequence: Synthetic oligonucleotide
  Description of Combined DNA/RNA Molecule: Synthetic oligonucleotide
uuuaautucacccucaguaugga

SEQ ID NO: 716 - RNA, 23 nt, Artificial Sequence
  Description of Artificial Sequence: Synthetic oligonucleotide
uagaucacaagccagcgugccuu

SEQ ID NO: 717 - RNA, 23 nt, Artificial Sequence
  Description of Artificial Sequence: Synthetic oligonucleotide
uacaagccagcgugccuuuucaa

SEQ ID NO: 718 - RNA, 23 nt, Artificial Sequence
  Description of Artificial Sequence: Synthetic oligonucleotide
uuuaaaacacacaauacacuaua

SEQ ID NO: 719 - RNA, 23 nt, Artificial Sequence
  Description of Artificial Sequence: Synthetic oligonucleotide
uaacaucuauguauauguucagc

SEQ ID NO: 720 - DNA, 23 bp, Artificial Sequence
  Description of Artificial Sequence: Synthetic oligonucleotide
  Description of Combined DNA/RNA Molecule: Synthetic oligonucleotide
uaucautuguuaaaacacacaau

SEQ ID NO: 721 - RNA, 23 nt, Artificial Sequence
  Description of Artificial Sequence: Synthetic oligonucleotide
uuauauagacauucacagacaga

SEQ ID NO: 722 - RNA, 23 nt, Artificial Sequence
  Description of Artificial Sequence: Synthetic oligonucleotide
uaagccagcgugccuuuucaauu

SEQ ID NO: 723 - DNA, 23 bp, Artificial Sequence
  Description of Artificial Sequence: Synthetic oligonucleotide
  Description of Combined DNA/RNA Molecule: Synthetic oligonucleotide
uacuautgauaaagugagucagc

SEQ ID NO: 724 - RNA, 23 nt, Artificial Sequence
  Description of Artificial Sequence: Synthetic oligonucleotide
uacaauacacuauauagacauuc

SEQ ID NO: 725 - DNA, 23 bp, Artificial Sequence
  Description of Artificial Sequence: Synthetic oligonucleotide
  Description of Combined DNA/RNA Molecule: Synthetic oligonucleotide
uugggutagaaaccucuuuacaa

SEQ ID NO: 726 - RNA, 23 nt, Artificial Sequence
  Description of Artificial Sequence: Synthetic oligonucleotide
uuaaaacacacaauacacuauau

SEQ ID NO: 727 - RNA, 23 nt, Artificial Sequence
  Description of Artificial Sequence: Synthetic oligonucleotide
ucaagccagcgugccuuuucaau

SEQ ID NO: 728 - RNA, 23 nt, Artificial Sequence
  Description of Artificial Sequence: Synthetic oligonucleotide
uaaacuguuggcaguaaugaggg

SEQ ID NO: 729 - RNA, 23 nt, Artificial Sequence
  Description of Artificial Sequence: Synthetic oligonucleotide
ugaucacaagccagcgugccuuu

SEQ ID NO: 730 - RNA, 23 nt, Artificial Sequence
  Description of Artificial Sequence: Synthetic oligonucleotide
uaucacaagccagcgugccuuuu

SEQ ID NO: 731 - RNA, 23 nt, Artificial Sequence
  Description of Artificial Sequence: Synthetic oligonucleotide
ugaugggacacgcaggugaucac

SEQ ID NO: 732 - RNA, 23 nt, Artificial Sequence
  Description of Artificial Sequence: Synthetic oligonucleotide
uuaagucuauuaggaggugaggc

SEQ ID NO: 733 - RNA, 23 nt, Artificial Sequence
  Description of Artificial Sequence: Synthetic oligonucleotide
uuaaaccaugaucuuaggcuggc

SEQ ID NO: 734 - RNA, 23 nt, Artificial Sequence
  Description of Artificial Sequence: Synthetic oligonucleotide
uaauuucacccucaguauggagu

SEQ ID NO: 735 - RNA, 23 nt, Artificial Sequence
  Description of Artificial Sequence: Synthetic oligonucleotide
ucuuuaacuguacccaaaccaga

SEQ ID NO: 736 - RNA, 23 nt, Artificial Sequence
  Description of Artificial Sequence: Synthetic oligonucleotide
uucacaagccagcgugccuuuuc

SEQ ID NO: 737 - RNA, 23 nt, Artificial Sequence
  Description of Artificial Sequence: Synthetic oligonucleotide
uaagaucacaagccagcgugccu

SEQ ID NO: 738 - RNA, 23 nt, Artificial Sequence
  Description of Artificial Sequence: Synthetic oligonucleotide
uuuuaacuguacccaaaccagaa

SEQ ID NO: 739 - RNA, 23 nt, Artificial Sequence
  Description of Artificial Sequence: Synthetic oligonucleotide
ucuuuucaaagcugaagagaaau

SEQ ID NO: 740 - RNA, 23 nt, Artificial Sequence
  Description of Artificial Sequence: Synthetic oligonucleotide
caagcucgcauggucaguaaaag

SEQ ID NO: 741 - RNA, 23 nt, Artificial Sequence
  Description of Artificial Sequence: Synthetic oligonucleotide
aagcucgcauggucaguaaaagc

SEQ ID NO: 742 - RNA, 23 nt, Artificial Sequence
  Description of Artificial Sequence: Synthetic oligonucleotide
uguauuguguguuuuaacaaaug

SEQ ID NO: 743 - RNA, 23 nt, Artificial Sequence
  Description of Artificial Sequence: Synthetic oligonucleotide
ggcagcaacaaaggauuugaaac

SEQ ID NO: 744 - RNA, 23 nt, Artificial Sequence
  Description of Artificial Sequence: Synthetic oligonucleotide
gggcuaaccaguucucuuuguaa

SEQ ID NO: 745 - RNA, 23 nt, Artificial Sequence
  Description of Artificial Sequence: Synthetic oligonucleotide
uguaguuggauuugucuguuuau

SEQ ID NO: 746 - RNA, 23 nt, Artificial Sequence
  Description of Artificial Sequence: Synthetic oligonucleotide
cugucugugaaugucuauauagu

SEQ ID NO: 747 - RNA, 23 nt, Artificial Sequence
  Description of Artificial Sequence: Synthetic oligonucleotide
cucaggcaauuccuuuugauucu

SEQ ID NO: 748 - RNA, 23 nt, Artificial Sequence
  Description of Artificial Sequence: Synthetic oligonucleotide
agcaacaaaggauuugaaacuug

SEQ ID NO: 749 - RNA, 23 nt, Artificial Sequence
  Description of Artificial Sequence: Synthetic oligonucleotide
cugcugacucacuuuaucaauag

SEQ ID NO: 750 - RNA, 23 nt, Artificial Sequence
  Description of Artificial Sequence: Synthetic oligonucleotide
gagcagcugaacauauacauaga

SEQ ID NO: 751 - RNA, 23 nt, Artificial Sequence
  Description of Artificial Sequence: Synthetic oligonucleotide
aaaggacgcauguaucuugaaau

SEQ ID NO: 752 - RNA, 23 nt, Artificial Sequence
  Description of Artificial Sequence: Synthetic oligonucleotide
uguaucuugaaaugcuuguaaag

SEQ ID NO: 753 - RNA, 23 nt, Artificial Sequence
  Description of Artificial Sequence: Synthetic oligonucleotide
ggcuaaccaguucucuuuguaag

SEQ ID NO: 754 - RNA, 23 nt, Artificial Sequence
  Description of Artificial Sequence: Synthetic oligonucleotide
ugcuuguaaagagguuucuaacc

SEQ ID NO: 755 - RNA, 23 nt, Artificial Sequence
  Description of Artificial Sequence: Synthetic oligonucleotide
cugugaaugucuauauaguguau

SEQ ID NO: 756 - RNA, 23 nt, Artificial Sequence
  Description of Artificial Sequence: Synthetic oligonucleotide
uucugucugugaaugucuauaua

SEQ ID NO: 757 - RNA, 23 nt, Artificial Sequence
  Description of Artificial Sequence: Synthetic oligonucleotide
ggagggacaugaaaucaucuuag

SEQ ID NO: 758 - RNA, 23 nt, Artificial Sequence
  Description of Artificial Sequence: Synthetic oligonucleotide
guuggauuugucuguuuaugcuu

SEQ ID NO: 759 - RNA, 23 nt, Artificial Sequence
  Description of Artificial Sequence: Synthetic oligonucleotide
uggagcagcugaacauauacaua

SEQ ID NO: 760 - RNA, 23 nt, Artificial Sequence
  Description of Artificial Sequence: Synthetic oligonucleotide
ccacagaaacccuguuuuauuga

SEQ ID NO: 761 - RNA, 23 nt, Artificial Sequence
  Description of Artificial Sequence: Synthetic oligonucleotide
gcuaaccaguucucuuuguaagg

SEQ ID NO: 762 - RNA, 23 nt, Artificial Sequence
  Description of Artificial Sequence: Synthetic oligonucleotide
uaucuugaaaugcuuguaaagag

SEQ ID NO: 763 - RNA, 23 nt, Artificial Sequence
  Description of Artificial Sequence: Synthetic oligonucleotide
auaguguauuguguguuuuaaca

SEQ ID NO: 764 - RNA, 23 nt, Artificial Sequence
  Description of Artificial Sequence: Synthetic oligonucleotide
agcagcugaacauauacauagau

SEQ ID NO: 765 - RNA, 23 nt, Artificial Sequence
  Description of Artificial Sequence: Synthetic oligonucleotide
aaaaaggacgcauguaucuugaa

SEQ ID NO: 766 - RNA, 23 nt, Artificial Sequence
  Description of Artificial Sequence: Synthetic oligonucleotide
acgcauguaucuugaaaugcuug

SEQ ID NO: 767 - RNA, 23 nt, Artificial Sequence
  Description of Artificial Sequence: Synthetic oligonucleotide
gcacgcuggcuugugaucuuaaa

SEQ ID NO: 768 - RNA, 23 nt, Artificial Sequence
  Description of Artificial Sequence: Synthetic oligonucleotide
uguuuuaacaaaugauuuacacu

SEQ ID NO: 769 - RNA, 23 nt, Artificial Sequence
  Description of Artificial Sequence: Synthetic oligonucleotide
uauuguguguuuuaacaaaugau

SEQ ID NO: 770 - RNA, 23 nt, Artificial Sequence
  Description of Artificial Sequence: Synthetic oligonucleotide
uuucugucugugaaugucuauau

SEQ ID NO: 771 - RNA, 23 nt, Artificial Sequence
  Description of Artificial Sequence: Synthetic oligonucleotide
uugcaagucccaugauuucuucg

SEQ ID NO: 772 - RNA, 23 nt, Artificial Sequence
  Description of Artificial Sequence: Synthetic oligonucleotide
ggcacgcuggcuugugaucuuaa

SEQ ID NO: 773 - RNA, 23 nt, Artificial Sequence
  Description of Artificial Sequence: Synthetic oligonucleotide
gauucaccagagugacuaugaua

SEQ ID NO: 774 - RNA, 23 nt, Artificial Sequence
  Description of Artificial Sequence: Synthetic oligonucleotide
cugacucacuuuaucaauaguuc

SEQ ID NO: 775 - RNA, 23 nt, Artificial Sequence
  Description of Artificial Sequence: Synthetic oligonucleotide
aaaaggacgcauguaucuugaaa

SEQ ID NO: 776 - RNA, 23 nt, Artificial Sequence
  Description of Artificial Sequence: Synthetic oligonucleotide
cacagaaacccuguuuuauugag

SEQ ID NO: 777 - RNA, 23 nt, Artificial Sequence
  Description of Artificial Sequence: Synthetic oligonucleotide
gucugugaaugucuauauagugu

SEQ ID NO: 778 - RNA, 23 nt, Artificial Sequence
  Description of Artificial Sequence: Synthetic oligonucleotide
gugaaugucuauauaguguauug

SEQ ID NO: 779 - RNA, 23 nt, Artificial Sequence
  Description of Artificial Sequence: Synthetic oligonucleotide
augcuuguaaagagguuucuaac

SEQ ID NO: 780 - RNA, 23 nt, Artificial Sequence
  Description of Artificial Sequence: Synthetic oligonucleotide
gacaugaaaucaucuuagcuuag

SEQ ID NO: 781 - RNA, 23 nt, Artificial Sequence
  Description of Artificial Sequence: Synthetic oligonucleotide
cuuguaaagagguuucuaaccca

SEQ ID NO: 782 - RNA, 23 nt, Artificial Sequence
  Description of Artificial Sequence: Synthetic oligonucleotide
aggacgcauguaucuugaaaugc

SEQ ID NO: 783 - RNA, 23 nt, Artificial Sequence
  Description of Artificial Sequence: Synthetic oligonucleotide
acuugcaagucccaugauuucuu

SEQ ID NO: 784 - RNA, 23 nt, Artificial Sequence
  Description of Artificial Sequence: Synthetic oligonucleotide
uggcagcaacaaaggauuugaaa

SEQ ID NO: 785 - RNA, 23 nt, Artificial Sequence
  Description of Artificial Sequence: Synthetic oligonucleotide
gggagggacaugaaaucaucuua

SEQ ID NO: 786 - RNA, 23 nt, Artificial Sequence
  Description of Artificial Sequence: Synthetic oligonucleotide
gggcuagauaggauauacuguau

SEQ ID NO: 787 - RNA, 23 nt, Artificial Sequence
  Description of Artificial Sequence: Synthetic oligonucleotide
ugggcuagauaggauauacugua

SEQ ID NO: 788 - RNA, 23 nt, Artificial Sequence
  Description of Artificial Sequence: Synthetic oligonucleotide
uaaagagguuucuaacccacccu

SEQ ID NO: 789 - RNA, 23 nt, Artificial Sequence
  Description of Artificial Sequence: Synthetic oligonucleotide
caguggcagcaacaaaggauuug

SEQ ID NO: 790 - RNA, 23 nt, Artificial Sequence
  Description of Artificial Sequence: Synthetic oligonucleotide
ugucugugaaugucuauauagug

SEQ ID NO: 791 - RNA, 23 nt, Artificial Sequence
  Description of Artificial Sequence: Synthetic oligonucleotide
uaguuggauuugucuguuuaugc

SEQ ID NO: 792 - RNA, 23 nt, Artificial Sequence
  Description of Artificial Sequence: Synthetic oligonucleotide
cuggagcagcugaacauauacau

SEQ ID NO: 793 - RNA, 23 nt, Artificial Sequence
  Description of Artificial Sequence: Synthetic oligonucleotide
guaucuugaaaugcuuguaaaga

SEQ ID NO: 794 - RNA, 23 nt, Artificial Sequence
  Description of Artificial Sequence: Synthetic oligonucleotide
ugaaaaggcacgcuggcuuguga

SEQ ID NO: 795 - RNA, 23 nt, Artificial Sequence
  Description of Artificial Sequence: Synthetic oligonucleotide
cuccauacugagggugaaauuaa

SEQ ID NO: 796 - RNA, 23 nt, Artificial Sequence
  Description of Artificial Sequence: Synthetic oligonucleotide
ugcugacucacuuuaucaauagu

SEQ ID NO: 797 - RNA, 23 nt, Artificial Sequence
  Description of Artificial Sequence: Synthetic oligonucleotide
acuucugguuuggguacaguuaa

SEQ ID NO: 798 - RNA, 23 nt, Artificial Sequence
  Description of Artificial Sequence: Synthetic oligonucleotide
ucugugaaugucuauauagugua

SEQ ID NO: 799 - RNA, 23 nt, Artificial Sequence
  Description of Artificial Sequence: Synthetic oligonucleotide
gcuccacagaaacccuguuuuau

SEQ ID NO: 800 - RNA, 23 nt, Artificial Sequence
  Description of Artificial Sequence: Synthetic oligonucleotide
augauuucaaccacauuugcuag

SEQ ID NO: 801 - RNA, 23 nt, Artificial Sequence
  Description of Artificial Sequence: Synthetic oligonucleotide
cuuucugucugugaaugucuaua

SEQ ID NO: 802 - RNA, 23 nt, Artificial Sequence
  Description of Artificial Sequence: Synthetic oligonucleotide
cuucugguuuggguacaguuaaa

SEQ ID NO: 803 - RNA, 23 nt, Artificial Sequence
  Description of Artificial Sequence: Synthetic oligonucleotide
uccauacugagggugaaauuaag

SEQ ID NO: 804 - RNA, 23 nt, Artificial Sequence
  Description of Artificial Sequence: Synthetic oligonucleotide
aaggcacgcuggcuugugaucuu

SEQ ID NO: 805 - RNA, 23 nt, Artificial Sequence
  Description of Artificial Sequence: Synthetic oligonucleotide
uugaaaaggcacgcuggcuugug

SEQ ID NO: 806 - RNA, 23 nt, Artificial Sequence
  Description of Artificial Sequence: Synthetic oligonucleotide
uauaguguauuguguguuuuaac

SEQ ID NO: 807 - RNA, 23 nt, Artificial Sequence
  Description of Artificial Sequence: Synthetic oligonucleotide
gcugaacauauacauagauguug

SEQ ID NO: 808 - RNA, 23 nt, Artificial Sequence
  Description of Artificial Sequence: Synthetic oligonucleotide
auuguguguuuuaacaaaugauu

SEQ ID NO: 809 - RNA, 23 nt, Artificial Sequence
  Description of Artificial Sequence: Synthetic oligonucleotide
ucugucugugaaugucuauauag

SEQ ID NO: 810 - RNA, 23 nt, Artificial Sequence
  Description of Artificial Sequence: Synthetic oligonucleotide
aauugaaaaggcacgcuggcuug

SEQ ID NO: 811 - RNA, 23 nt, Artificial Sequence
  Description of Artificial Sequence: Synthetic oligonucleotide
gcugacucacuuuaucaauaguu

SEQ ID NO: 812 - RNA, 23 nt, Artificial Sequence
  Description of Artificial Sequence: Synthetic oligonucleotide
gaaugucuauauaguguauugug

SEQ ID NO: 813 - RNA, 23 nt, Artificial Sequence
  Description of Artificial Sequence: Synthetic oligonucleotide
uuguaaagagguuucuaacccac

SEQ ID NO: 814 - RNA, 23 nt, Artificial Sequence
  Description of Artificial Sequence: Synthetic oligonucleotide
auauaguguauuguguguuuuaa

SEQ ID NO: 815 - RNA, 23 nt, Artificial Sequence
  Description of Artificial Sequence: Synthetic oligonucleotide
auugaaaaggcacgcuggcuugu

SEQ ID NO: 816 - RNA, 23 nt, Artificial Sequence
  Description of Artificial Sequence: Synthetic oligonucleotide
cccucauuacugccaacaguuuc

SEQ ID NO: 817 - RNA, 23 nt, Artificial Sequence
  Description of Artificial Sequence: Synthetic oligonucleotide
aaaggcacgcuggcuugugaucu

SEQ ID NO: 818 - RNA, 23 nt, Artificial Sequence
  Description of Artificial Sequence: Synthetic oligonucleotide
aaaaggcacgcuggcuugugauc

SEQ ID NO: 819 - RNA, 23 nt, Artificial Sequence
  Description of Artificial Sequence: Synthetic oligonucleotide
gugaucaccugcgugucccaucu

SEQ ID NO: 820 - RNA, 23 nt, Artificial Sequence
  Description of Artificial Sequence: Synthetic oligonucleotide
gccucaccuccuaauagacuuag

SEQ ID NO: 821 - RNA, 23 nt, Artificial Sequence
  Description of Artificial Sequence: Synthetic oligonucleotide
gccagccuaagaucaugguuuag

SEQ ID NO: 822 - RNA, 23 nt, Artificial Sequence
  Description of Artificial Sequence: Synthetic oligonucleotide
acuccauacugagggugaaauua

SEQ ID NO: 823 - RNA, 23 nt, Artificial Sequence
  Description of Artificial Sequence: Synthetic oligonucleotide
ucugguuuggguacaguuaaagg

SEQ ID NO: 824 - RNA, 23 nt, Artificial Sequence
  Description of Artificial Sequence: Synthetic oligonucleotide
gaaaaggcacgcuggcuugugau

SEQ ID NO: 825 - RNA, 23 nt, Artificial Sequence
  Description of Artificial Sequence: Synthetic oligonucleotide
aggcacgcuggcuugugaucuua

SEQ ID NO: 826 - RNA, 23 nt, Artificial Sequence
  Description of Artificial Sequence: Synthetic oligonucleotide
uucugguuuggguacaguuaaag

SEQ ID NO: 827 - RNA, 23 nt, Artificial Sequence
  Description of Artificial Sequence: Synthetic oligonucleotide
auuucucuucagcuuugaaaagg

SEQ ID NO: 828 - RNA, 21 nt, Artificial Sequence
  Description of Artificial Sequence: Synthetic oligonucleotide
agcucgcauggucaguaaaaa

SEQ ID NO: 829 - RNA, 21 nt, Artificial Sequence
  Description of Artificial Sequence: Synthetic oligonucleotide
cgcauggucaguaaaagcaaa

SEQ ID NO: 830 - RNA, 21 nt, Artificial Sequence
  Description of Artificial Sequence: Synthetic oligonucleotide
gcucgcauggucaguaaaaga

SEQ ID NO: 831 - RNA, 21 nt, Artificial Sequence
  Description of Artificial Sequence: Synthetic oligonucleotide
uugcaagucccaugauuucua

SEQ ID NO: 832 - RNA, 21 nt, Artificial Sequence
  Description of Artificial Sequence: Synthetic oligonucleotide
gacucacuuuaucaauaguua

SEQ ID NO: 833 - RNA, 21 nt, Artificial Sequence
  Description of Artificial Sequence: Synthetic oligonucleotide
aaaggacgcauguaucuugaa

SEQ ID NO: 834 - RNA, 21 nt, Artificial Sequence
  Description of Artificial Sequence: Synthetic oligonucleotide
ucuugaaaugcuuguaaagaa

SEQ ID NO: 835 - RNA, 21 nt, Artificial Sequence
  Description of Artificial Sequence: Synthetic oligonucleotide
caggcaauuccuuuugauuca

SEQ ID NO: 836 - RNA, 21 nt, Artificial Sequence
  Description of Artificial Sequence: Synthetic oligonucleotide
gagggacaugaaaucaucuua

SEQ ID NO: 837 - RNA, 21 nt, Artificial Sequence
  Description of Artificial Sequence: Synthetic oligonucleotide
ucugucugugaaugucuauaa

SEQ ID NO: 838 - RNA, 21 nt, Artificial Sequence
  Description of Artificial Sequence: Synthetic oligonucleotide
gcacgcuggcuugugaucuua

SEQ ID NO: 839 - RNA, 21 nt, Artificial Sequence
  Description of Artificial Sequence: Synthetic oligonucleotide
ugucugugaaugucuauauaa

SEQ ID NO: 840 - RNA, 21 nt, Artificial Sequence
  Description of Artificial Sequence: Synthetic oligonucleotide
agggacaugaaaucaucuuaa

SEQ ID NO: 841 - RNA, 21 nt, Artificial Sequence
  Description of Artificial Sequence: Synthetic oligonucleotide
gugaaugucuauauaguguaa

SEQ ID NO: 842 - RNA, 21 nt, Artificial Sequence
  Description of Artificial Sequence: Synthetic oligonucleotide
uguguguuuuaacaaaugaua

SEQ ID NO: 843 - RNA, 21 nt, Artificial Sequence
  Description of Artificial Sequence: Synthetic oligonucleotide
gcaagucccaugauuucuuca

SEQ ID NO: 844 - RNA, 21 nt, Artificial Sequence
  Description of Artificial Sequence: Synthetic oligonucleotide
aaggacgcauguaucuugaaa

SEQ ID NO: 845 - RNA, 21 nt, Artificial Sequence
  Description of Artificial Sequence: Synthetic oligonucleotide
gucugugaaugucuauauaga

SEQ ID NO: 846 - RNA, 21 nt, Artificial Sequence
  Description of Artificial Sequence: Synthetic oligonucleotide
cuaaccaguucucuuuguaaa

SEQ ID NO: 847 - RNA, 21 nt, Artificial Sequence
  Description of Artificial Sequence: Synthetic oligonucleotide
gacuguauccuguuugcuaua

SEQ ID NO: 848 - RNA, 21 nt, Artificial Sequence
  Description of Artificial Sequence: Synthetic oligonucleotide
uauuguguguuuuaacaaaua

SEQ ID NO: 849 - RNA, 21 nt, Artificial Sequence
  Description of Artificial Sequence: Synthetic oligonucleotide
guuggauuugucuguuuauga

SEQ ID NO: 850 - RNA, 21 nt, Artificial Sequence
  Description of Artificial Sequence: Synthetic oligonucleotide
cugucugugaaugucuauaua

SEQ ID NO: 851 - RNA, 21 nt, Artificial Sequence
  Description of Artificial Sequence: Synthetic oligonucleotide
gcagcaacaaaggauuugaaa

SEQ ID NO: 852 - RNA, 21 nt, Artificial Sequence
  Description of Artificial Sequence: Synthetic oligonucleotide
gagcagcugaacauauacaua

SEQ ID NO: 853 - RNA, 21 nt, Artificial Sequence
  Description of Artificial Sequence: Synthetic oligonucleotide
aucuugaaaugcuuguaaaga

SEQ ID NO: 854 - RNA, 21 nt, Artificial Sequence
  Description of Artificial Sequence: Synthetic oligonucleotide
gaaugucuauauaguguauua

SEQ ID NO: 855 - RNA, 21 nt, Artificial Sequence
  Description of Artificial Sequence: Synthetic oligonucleotide
acgcuggcuugugaucuuaaa

SEQ ID NO: 856 - RNA, 21 nt, Artificial Sequence
  Description of Artificial Sequence: Synthetic oligonucleotide
gcuaaccaguucucuuuguaa

SEQ ID NO: 857 - RNA, 21 nt, Artificial Sequence
  Description of Artificial Sequence: Synthetic oligonucleotide
cugacucacuuuaucaauaga

SEQ ID NO: 858 - RNA, 21 nt, Artificial Sequence
  Description of Artificial Sequence: Synthetic oligonucleotide
uucugucugugaaugucuaua

SEQ ID NO: 859 - RNA, 21 nt, Artificial Sequence
  Description of Artificial Sequence: Synthetic oligonucleotide
auuguguguuuuaacaaauga

SEQ ID NO: 860 - RNA, 21 nt, Artificial Sequence
  Description of Artificial Sequence: Synthetic oligonucleotide
uaucuugaaaugcuuguaaaa

SEQ ID NO: 861 - RNA, 21 nt, Artificial Sequence
  Description of Artificial Sequence: Synthetic oligonucleotide
ggagcagcugaacauauacaa

SEQ ID NO: 862 - RNA, 21 nt, Artificial Sequence
  Description of Artificial Sequence: Synthetic oligonucleotide
auaguguauuguguguuuuaa

SEQ ID NO: 863 - RNA, 21 nt, Artificial Sequence
  Description of Artificial Sequence: Synthetic oligonucleotide
gcauguaucuugaaaugcuua

SEQ ID NO: 864 - RNA, 21 nt, Artificial Sequence
  Description of Artificial Sequence: Synthetic oligonucleotide
cuuguaaagagguuucuaaca

SEQ ID NO: 865 - RNA, 21 nt, Artificial Sequence
  Description of Artificial Sequence: Synthetic oligonucleotide
ugaacauauacauagauguua

SEQ ID NO: 866 - RNA, 21 nt, Artificial Sequence
  Description of Artificial Sequence: Synthetic oligonucleotide
uccacagaaacccuguuuuaa

SEQ ID NO: 867 - RNA, 21 nt, Artificial Sequence
  Description of Artificial Sequence: Synthetic oligonucleotide
ggcuagauaggauauacugua

SEQ ID NO: 868 - RNA, 21 nt, Artificial Sequence
  Description of Artificial Sequence: Synthetic oligonucleotide
caugaaaucaucuuagcuuaa

SEQ ID NO: 869 - RNA, 21 nt, Artificial Sequence
  Description of Artificial Sequence: Synthetic oligonucleotide
uaguguauuguguguuuuaaa

SEQ ID NO: 870 - RNA, 21 nt, Artificial Sequence
  Description of Artificial Sequence: Synthetic oligonucleotide
cagcugaacauauacauagaa

SEQ ID NO: 871 - RNA, 21 nt, Artificial Sequence
  Description of Artificial Sequence: Synthetic oligonucleotide
agggcuaaccaguucucuuua

SEQ ID NO: 872 - RNA, 21 nt, Artificial Sequence
  Description of Artificial Sequence: Synthetic oligonucleotide
aggacgcauguaucuugaaaa

SEQ ID NO: 873 - RNA, 21 nt, Artificial Sequence
  Description of Artificial Sequence: Synthetic oligonucleotide
uggauuugucuguuuaugcua

SEQ ID NO: 874 - RNA, 21 nt, Artificial Sequence
  Description of Artificial Sequence: Synthetic oligonucleotide
gcuuguaaagagguuucuaaa

SEQ ID NO: 875 - RNA, 21 nt, Artificial Sequence
  Description of Artificial Sequence: Synthetic oligonucleotide
acagaaacccuguuuuauuga

SEQ ID NO: 876 - RNA, 21 nt, Artificial Sequence
  Description of Artificial Sequence: Synthetic oligonucleotide
cacgcuggcuugugaucuuaa

SEQ ID NO: 877 - RNA, 21 nt, Artificial Sequence
  Description of Artificial Sequence: Synthetic oligonucleotide
gcagcugaacauauacauaga

SEQ ID NO: 878 - RNA, 21 nt, Artificial Sequence
  Description of Artificial Sequence: Synthetic oligonucleotide
augucuauauaguguauugua

SEQ ID NO: 879 - RNA, 21 nt, Artificial Sequence
  Description of Artificial Sequence: Synthetic oligonucleotide
cugugaaugucuauauaguga

SEQ ID NO: 880 - RNA, 21 nt, Artificial Sequence
  Description of Artificial Sequence: Synthetic oligonucleotide
uuguguguuuuaacaaaugaa

SEQ ID NO: 881 - RNA, 21 nt, Artificial Sequence
  Description of Artificial Sequence: Synthetic oligonucleotide
uaaccaguucucuuuguaaga

SEQ ID NO: 882 - RNA, 21 nt, Artificial Sequence
  Description of Artificial Sequence: Synthetic oligonucleotide
uaguuggauuugucuguuuaa

SEQ ID NO: 883 - RNA, 21 nt, Artificial Sequence
  Description of Artificial Sequence: Synthetic oligonucleotide
ugaaaaggcacgcuggcuuga

SEQ ID NO: 884 - RNA, 21 nt, Artificial Sequence
  Description of Artificial Sequence: Synthetic oligonucleotide
ugugaaugucuauauagugua

SEQ ID NO: 885 - RNA, 21 nt, Artificial Sequence
  Description of Artificial Sequence: Synthetic oligonucleotide
gacgcauguaucuugaaauga

SEQ ID NO: 886 - RNA, 21 nt, Artificial Sequence
  Description of Artificial Sequence: Synthetic oligonucleotide
caacaaaggauuugaaacuua

SEQ ID NO: 887 - RNA, 21 nt, Artificial Sequence
  Description of Artificial Sequence: Synthetic oligonucleotide
ucugugaaugucuauauagua

SEQ ID NO: 888 - RNA, 21 nt, Artificial Sequence
  Description of Artificial Sequence: Synthetic oligonucleotide
aguguauuguguguuuuaaca

SEQ ID NO: 889 - RNA, 21 nt, Artificial Sequence
  Description of Artificial Sequence: Synthetic oligonucleotide
gauuucaaccacauuugcuaa

SEQ ID NO: 890 - RNA, 21 nt, Artificial Sequence
  Description of Artificial Sequence: Synthetic oligonucleotide
uucaccagagugacuaugaua

SEQ ID NO: 891 - RNA, 21 nt, Artificial Sequence
  Description of Artificial Sequence: Synthetic oligonucleotide
guggcagcaacaaaggauuua

SEQ ID NO: 892 - RNA, 21 nt, Artificial Sequence
  Description of Artificial Sequence: Synthetic oligonucleotide
ggacgcauguaucuugaaaua

SEQ ID NO: 893 - RNA, 21 nt, Artificial Sequence
  Description of Artificial Sequence: Synthetic oligonucleotide
uauccuguuugcuauugcuua

SEQ ID NO: 894 - RNA, 21 nt, Artificial Sequence
  Description of Artificial Sequence: Synthetic oligonucleotide
uucucuucagcuuugaaaaga

SEQ ID NO: 895 - RNA, 21 nt, Artificial Sequence
  Description of Artificial Sequence: Synthetic oligonucleotide
ucugguuuggguacaguuaaa

SEQ ID NO: 896 - RNA, 21 nt, Artificial Sequence
  Description of Artificial Sequence: Synthetic oligonucleotide
cagcaacaaaggauuugaaaa

SEQ ID NO: 897 - RNA, 21 nt, Artificial Sequence
  Description of Artificial Sequence: Synthetic oligonucleotide
aaaaggcacgcuggcuuguga

SEQ ID NO: 898 - RNA, 21 nt, Artificial Sequence
  Description of Artificial Sequence: Synthetic oligonucleotide
ugccucguaacccuuuucaua

SEQ ID NO: 899 - RNA, 21 nt, Artificial Sequence
  Description of Artificial Sequence: Synthetic oligonucleotide
aaaggcacgcuggcuugugaa

SEQ ID NO: 900 - RNA, 21 nt, Artificial Sequence
  Description of Artificial Sequence: Synthetic oligonucleotide
cagaaacccuguuuuauugaa

SEQ ID NO: 901 - RNA, 21 nt, Artificial Sequence
  Description of Artificial Sequence: Synthetic oligonucleotide
gaaaaggcacgcuggcuugua

SEQ ID NO: 902 - RNA, 21 nt, Artificial Sequence
  Description of Artificial Sequence: Synthetic oligonucleotide
ugguuuggguacaguuaaaga

SEQ ID NO: 903 - RNA, 21 nt, Artificial Sequence
  Description of Artificial Sequence: Synthetic oligonucleotide
aaggcacgcuggcuugugaua

SEQ ID NO: 904 - RNA, 21 nt, Artificial Sequence
  Description of Artificial Sequence: Synthetic oligonucleotide
cauacugagggugaaauuaaa

SEQ ID NO: 905 - RNA, 21 nt, Artificial Sequence
  Description of Artificial Sequence: Synthetic oligonucleotide
gcugacucacuuuaucaauaa

SEQ ID NO: 906 - RNA, 21 nt, Artificial Sequence
  Description of Artificial Sequence: Synthetic oligonucleotide
uucugguuuggguacaguuaa

SEQ ID NO: 907 - RNA, 21 nt, Artificial Sequence
  Description of Artificial Sequence: Synthetic oligonucleotide
cugguuuggguacaguuaaaa

SEQ ID NO: 908 - RNA, 21 nt, Artificial Sequence
  Description of Artificial Sequence: Synthetic oligonucleotide
gcuagauaggauauacuguaa

SEQ ID NO: 909 - RNA, 21 nt, Artificial Sequence
  Description of Artificial Sequence: Synthetic oligonucleotide
cucauuacugccaacaguuua

SEQ ID NO: 910 - RNA, 21 nt, Artificial Sequence
  Description of Artificial Sequence: Synthetic oligonucleotide
ccauacugagggugaaauuaa

SEQ ID NO: 911 - RNA, 21 nt, Artificial Sequence
  Description of Artificial Sequence: Synthetic oligonucleotide
cagccuaagaucaugguuuaa

SEQ ID NO: 912 - RNA, 21 nt, Artificial Sequence
  Description of Artificial Sequence: Synthetic oligonucleotide
aagagguuucuaacccaccca

SEQ ID NO: 913 - RNA, 21 nt, Artificial Sequence
  Description of Artificial Sequence: Synthetic oligonucleotide
ugacucacuuuaucaauagua

SEQ ID NO: 914 - RNA, 21 nt, Artificial Sequence
  Description of Artificial Sequence: Synthetic oligonucleotide
uguaaagagguuucuaaccca

SEQ ID NO: 915 - RNA, 21 nt, Artificial Sequence
  Description of Artificial Sequence: Synthetic oligonucleotide
uugaaaaggcacgcuggcuua

SEQ ID NO: 916 - RNA, 21 nt, Artificial Sequence
  Description of Artificial Sequence: Synthetic oligonucleotide
uccauacugagggugaaauua

SEQ ID NO: 917 - RNA, 21 nt, Artificial Sequence
  Description of Artificial Sequence: Synthetic oligonucleotide
gaucaccugcgugucccauca

SEQ ID NO: 918 - RNA, 21 nt, Artificial Sequence
  Description of Artificial Sequence: Synthetic oligonucleotide
ggcacgcuggcuugugaucua

SEQ ID NO: 919 - RNA, 21 nt, Artificial Sequence
  Description of Artificial Sequence: Synthetic oligonucleotide
aggcacgcuggcuugugauca

SEQ ID NO: 920 - RNA, 21 nt, Artificial Sequence
  Description of Artificial Sequence: Synthetic oligonucleotide
guaaagagguuucuaacccaa

SEQ ID NO: 921 - RNA, 23 nt, Artificial Sequence
  Description of Artificial Sequence: Synthetic oligonucleotide
uuuuuacugaccaugcgagcuug

SEQ ID NO: 922 - RNA, 23 nt, Artificial Sequence
  Description of Artificial Sequence: Synthetic oligonucleotide
uuugcuuuuacugaccaugcgag

SEQ ID NO: 923 - RNA, 23 nt, Artificial Sequence
  Description of Artificial Sequence: Synthetic oligonucleotide
ucuuuuacugaccaugcgagcuu

SEQ ID NO: 924 - RNA, 23 nt, Artificial Sequence
  Description of Artificial Sequence: Synthetic oligonucleotide
uagaaaucaugggacuugcaagu

SEQ ID NO: 925 - RNA, 23 nt, Artificial Sequence
  Description of Artificial Sequence: Synthetic oligonucleotide
uaacuauugauaaagugagucag

SEQ ID NO: 926 - RNA, 23 nt, Artificial Sequence
  Description of Artificial Sequence: Synthetic oligonucleotide
uucaagauacaugcguccuuuuu

SEQ ID NO: 927 - RNA, 23 nt, Artificial Sequence
  Description of Artificial Sequence: Synthetic oligonucleotide
uucuuuacaagcauuucaagaua

SEQ ID NO: 928 - RNA, 23 nt, Artificial Sequence
  Description of Artificial Sequence: Synthetic oligonucleotide
ugaaucaaaaggaauugccugag

SEQ ID NO: 929 - RNA, 23 nt, Artificial Sequence
  Description of Artificial Sequence: Synthetic oligonucleotide
uaagaugauuucaugucccuccc

SEQ ID NO: 930 - RNA, 23 nt, Artificial Sequence
  Description of Artificial Sequence: Synthetic oligonucleotide
uuauagacauucacagacagaaa

SEQ ID NO: 931 - RNA, 23 nt, Artificial Sequence
  Description of Artificial Sequence: Synthetic oligonucleotide
uaagaucacaagccagcgugccu

SEQ ID NO: 932 - RNA, 23 nt, Artificial Sequence
  Description of Artificial Sequence: Synthetic oligonucleotide
uuauauagacauucacagacaga

SEQ ID NO: 933 - RNA, 23 nt, Artificial Sequence
  Description of Artificial Sequence: Synthetic oligonucleotide
uuaagaugauuucaugucccucc

SEQ ID NO: 934 - RNA, 23 nt, Artificial Sequence
  Description of Artificial Sequence: Synthetic oligonucleotide
uuacacuauauagacauucacag

SEQ ID NO: 935 - RNA, 23 nt, Artificial Sequence
  Description of Artificial Sequence: Synthetic oligonucleotide
uaucauuuguuaaaacacacaau

SEQ ID NO: 936 - RNA, 23 nt, Artificial Sequence
  Description of Artificial Sequence: Synthetic oligonucleotide
ugaagaaaucaugggacuugcaa

SEQ ID NO: 937 - RNA, 23 nt, Artificial Sequence
  Description of Artificial Sequence: Synthetic oligonucleotide
uuucaagauacaugcguccuuuu

SEQ ID NO: 938 - RNA, 23 nt, Artificial Sequence
  Description of Artificial Sequence: Synthetic oligonucleotide
ucuauauagacauucacagacag

SEQ ID NO: 939 - RNA, 23 nt, Artificial Sequence
  Description of Artificial Sequence: Synthetic oligonucleotide
uuuacaaagagaacugguuagcc

SEQ ID NO: 940 - RNA, 23 nt, Artificial Sequence
  Description of Artificial Sequence: Synthetic oligonucleotide
uauagcaaacaggauacagucuc

SEQ ID NO: 941 - RNA, 23 nt, Artificial Sequence
  Description of Artificial Sequence: Synthetic oligonucleotide
uauuuguuaaaacacacaauaca

SEQ ID NO: 942 - RNA, 23 nt, Artificial Sequence
  Description of Artificial Sequence: Synthetic oligonucleotide
ucauaaacagacaaauccaacua

SEQ ID NO: 943 - RNA, 23 nt, Artificial Sequence
  Description of Artificial Sequence: Synthetic oligonucleotide
uauauagacauucacagacagaa

SEQ ID NO: 944 - RNA, 23 nt, Artificial Sequence
  Description of Artificial Sequence: Synthetic oligonucleotide
uuucaaauccuuuguugcugcca

SEQ ID NO: 945 - RNA, 23 nt, Artificial Sequence
  Description of Artificial Sequence: Synthetic oligonucleotide
uauguauauguucagcugcucca

SEQ ID NO: 946 - RNA, 23 nt, Artificial Sequence
  Description of Artificial Sequence: Synthetic oligonucleotide
ucuuuacaagcauuucaagauac

SEQ ID NO: 947 - RNA, 23 nt, Artificial Sequence
  Description of Artificial Sequence: Synthetic oligonucleotide
uaauacacuauauagacauucac

SEQ ID NO: 948 - RNA, 23 nt, Artificial Sequence
  Description of Artificial Sequence: Synthetic oligonucleotide
uuuaagaucacaagccagcgugc

SEQ ID NO: 949 - RNA, 23 nt, Artificial Sequence
  Description of Artificial Sequence: Synthetic oligonucleotide
uuacaaagagaacugguuagccc

SEQ ID NO: 950 - RNA, 23 nt, Artificial Sequence
  Description of Artificial Sequence: Synthetic oligonucleotide
ucuauugauaaagugagucagca

SEQ ID NO: 951 - RNA, 23 nt, Artificial Sequence
  Description of Artificial Sequence: Synthetic oligonucleotide
uauagacauucacagacagaaag

SEQ ID NO: 952 - RNA, 23 nt, Artificial Sequence
  Description of Artificial Sequence: Synthetic oligonucleotide
ucauuuguuaaaacacacaauac

SEQ ID NO: 953 - RNA, 23 nt, Artificial Sequence
  Description of Artificial Sequence: Synthetic oligonucleotide
uuuuacaagcauuucaagauaca

SEQ ID NO: 954 - RNA, 23 nt, Artificial Sequence
  Description of Artificial Sequence: Synthetic oligonucleotide
uuguauauguucagcugcuccag

SEQ ID NO: 955 - RNA, 23 nt, Artificial Sequence
  Description of Artificial Sequence: Synthetic oligonucleotide
uuaaaacacacaauacacuauau

SEQ ID NO: 956 - RNA, 23 nt, Artificial Sequence
  Description of Artificial Sequence: Synthetic oligonucleotide
uaagcauuucaagauacaugcgu

SEQ ID NO: 957 - RNA, 23 nt, Artificial Sequence
  Description of Artificial Sequence: Synthetic oligonucleotide
uguuagaaaccucuuuacaagca

SEQ ID NO: 958 - RNA, 23 nt, Artificial Sequence
  Description of Artificial Sequence: Synthetic oligonucleotide
uaacaucuauguauauguucagc

SEQ ID NO: 959 - RNA, 23 nt, Artificial Sequence
  Description of Artificial Sequence: Synthetic oligonucleotide
uuaaaacaggguuucuguggagc

SEQ ID NO: 960 - RNA, 23 nt, Artificial Sequence
  Description of Artificial Sequence: Synthetic oligonucleotide
uacaguauauccuaucuagccca

SEQ ID NO: 961 - RNA, 23 nt, Artificial Sequence
  Description of Artificial Sequence: Synthetic oligonucleotide
uuaagcuaagaugauuucauguc

SEQ ID NO: 962 - RNA, 23 nt, Artificial Sequence
  Description of Artificial Sequence: Synthetic oligonucleotide
uuuaaaacacacaauacacuaua

SEQ ID NO: 963 - RNA, 23 nt, Artificial Sequence
  Description of Artificial Sequence: Synthetic oligonucleotide
uucuauguauauguucagcugcu

SEQ ID NO: 964 - RNA, 23 nt, Artificial Sequence
  Description of Artificial Sequence: Synthetic oligonucleotide
uaaagagaacugguuagcccuaa

SEQ ID NO: 965 - RNA, 23 nt, Artificial Sequence
  Description of Artificial Sequence: Synthetic oligonucleotide
uuuucaagauacaugcguccuuu

SEQ ID NO: 966 - RNA, 23 nt, Artificial Sequence
  Description of Artificial Sequence: Synthetic oligonucleotide
uagcauaaacagacaaauccaac

SEQ ID NO: 967 - RNA, 23 nt, Artificial Sequence
  Description of Artificial Sequence: Synthetic oligonucleotide
uuuagaaaccucuuuacaagcau

SEQ ID NO: 968 - RNA, 23 nt, Artificial Sequence
  Description of Artificial Sequence: Synthetic oligonucleotide
ucaauaaaacaggguuucugugg

SEQ ID NO: 969 - RNA, 23 nt, Artificial Sequence
  Description of Artificial Sequence: Synthetic oligonucleotide
uuaagaucacaagccagcgugcc

SEQ ID NO: 970 - RNA, 23 nt, Artificial Sequence
  Description of Artificial Sequence: Synthetic oligonucleotide
ucuauguauauguucagcugcuc

SEQ ID NO: 971 - RNA, 23 nt, Artificial Sequence
  Description of Artificial Sequence: Synthetic oligonucleotide
uacaauacacuauauagacauuc

SEQ ID NO: 972 - RNA, 23 nt, Artificial Sequence
  Description of Artificial Sequence: Synthetic oligonucleotide
ucacuauauagacauucacagac

SEQ ID NO: 973 - RNA, 23 nt, Artificial Sequence
  Description of Artificial Sequence: Synthetic oligonucleotide
uucauuuguuaaaacacacaaua

SEQ ID NO: 974 - RNA, 23 nt, Artificial Sequence
  Description of Artificial Sequence: Synthetic oligonucleotide
ucuuacaaagagaacugguuagc

SEQ ID NO: 975 - RNA, 23 nt, Artificial Sequence
  Description of Artificial Sequence: Synthetic oligonucleotide
uuaaacagacaaauccaacuaca

SEQ ID NO: 976 - RNA, 23 nt, Artificial Sequence
  Description of Artificial Sequence: Synthetic oligonucleotide
ucaagccagcgugccuuuucaau

SEQ ID NO: 977 - RNA, 23 nt, Artificial Sequence
  Description of Artificial Sequence: Synthetic oligonucleotide
uacacuauauagacauucacaga

SEQ ID NO: 978 - RNA, 23 nt, Artificial Sequence
  Description of Artificial Sequence: Synthetic oligonucleotide
ucauuucaagauacaugcguccu

SEQ ID NO: 979 - RNA, 23 nt, Artificial Sequence
  Description of Artificial Sequence: Synthetic oligonucleotide
uaaguuucaaauccuuuguugcu

SEQ ID NO: 980 - RNA, 23 nt, Artificial Sequence
  Description of Artificial Sequence: Synthetic oligonucleotide
uacuauauagacauucacagaca

SEQ ID NO: 981 - RNA, 23 nt, Artificial Sequence
  Description of Artificial Sequence: Synthetic oligonucleotide
uguuaaaacacacaauacacuau

SEQ ID NO: 982 - RNA, 23 nt, Artificial Sequence
  Description of Artificial Sequence: Synthetic oligonucleotide
uuagcaaaugugguugaaaucau

SEQ ID NO: 983 - RNA, 23 nt, Artificial Sequence
  Description of Artificial Sequence: Synthetic oligonucleotide
uaucauagucacucuggugaauc

SEQ ID NO: 984 - RNA, 23 nt, Artificial Sequence
  Description of Artificial Sequence: Synthetic oligonucleotide
uaaauccuuuguugcugccacug

SEQ ID NO: 985 - RNA, 23 nt, Artificial Sequence
  Description of Artificial Sequence: Synthetic oligonucleotide
uauuucaagauacaugcguccuu

SEQ ID NO: 986 - RNA, 23 nt, Artificial Sequence
  Description of Artificial Sequence: Synthetic oligonucleotide
uaagcaauagcaaacaggauaca

SEQ ID NO: 987 - RNA, 23 nt, Artificial Sequence
  Description of Artificial Sequence: Synthetic oligonucleotide
ucuuuucaaagcugaagagaaau

SEQ ID NO: 988 - RNA, 23 nt, Artificial Sequence
  Description of Artificial Sequence: Synthetic oligonucleotide
uuuaacuguacccaaaccagaag

SEQ ID NO: 989 - RNA, 23 nt, Artificial Sequence
  Description of Artificial Sequence: Synthetic oligonucleotide
uuuucaaauccuuuguugcugcc

SEQ ID NO: 990 - RNA, 23 nt, Artificial Sequence
  Description of Artificial Sequence: Synthetic oligonucleotide
ucacaagccagcgugccuuuuca

SEQ ID NO: 991 - RNA, 23 nt, Artificial Sequence
  Description of Artificial Sequence: Synthetic oligonucleotide
uaugaaaaggguuacgaggcagu

SEQ ID NO: 992 - RNA, 23 nt, Artificial Sequence
  Description of Artificial Sequence: Synthetic oligonucleotide
uucacaagccagcgugccuuuuc

SEQ ID NO: 993 - RNA, 23 nt, Artificial Sequence
  Description of Artificial Sequence: Synthetic oligonucleotide
uucaauaaaacaggguuucugug

SEQ ID NO: 994 - RNA, 23 nt, Artificial Sequence
  Description of Artificial Sequence: Synthetic oligonucleotide
uacaagccagcgugccuuuucaa

SEQ ID NO: 995 - RNA, 23 nt, Artificial Sequence
  Description of Artificial Sequence: Synthetic oligonucleotide
ucuuuaacuguacccaaaccaga

SEQ ID NO: 996 - RNA, 23 nt, Artificial Sequence
  Description of Artificial Sequence: Synthetic oligonucleotide
uaucacaagccagcgugccuuuu

SEQ ID NO: 997 - RNA, 23 nt, Artificial Sequence
  Description of Artificial Sequence: Synthetic oligonucleotide
uuuaauuucacccucaguaugga

SEQ ID NO: 998 - RNA, 23 nt, Artificial Sequence
  Description of Artificial Sequence: Synthetic oligonucleotide
uuauugauaaagugagucagcag

SEQ ID NO: 999 - RNA, 23 nt, Artificial Sequence
  Description of Artificial Sequence: Synthetic oligonucleotide
uuaacuguacccaaaccagaagu

SEQ ID NO: 1000 - RNA, 23 nt, Artificial Sequence
  Description of Artificial Sequence: Synthetic oligonucleotide
uuuuaacuguacccaaaccagaa

SEQ ID NO: 1001 - RNA, 23 nt, Artificial Sequence
  Description of Artificial Sequence: Synthetic oligonucleotide
uuacaguauauccuaucuagccc

SEQ ID NO: 1002 - RNA, 23 nt, Artificial Sequence
  Description of Artificial Sequence: Synthetic oligonucleotide
uaaacuguuggcaguaaugaggg

SEQ ID NO: 1003 - RNA, 23 nt, Artificial Sequence
  Description of Artificial Sequence: Synthetic oligonucleotide
uuaauuucacccucaguauggag

SEQ ID NO: 1004 - RNA, 23 nt, Artificial Sequence
  Description of Artificial Sequence: Synthetic oligonucleotide
uuaaaccaugaucuuaggcuggc

SEQ ID NO: 1005 - RNA, 23 nt, Artificial Sequence
  Description of Artificial Sequence: Synthetic oligonucleotide
uggguggguuagaaaccucuuua

SEQ ID NO: 1006 - RNA, 23 nt, Artificial Sequence
  Description of Artificial Sequence: Synthetic oligonucleotide
uacuauugauaaagugagucagc

SEQ ID NO: 1007 - RNA, 23 nt, Artificial Sequence
  Description of Artificial Sequence: Synthetic oligonucleotide
uggguuagaaaccucuuuacaag

SEQ ID NO: 1008 - RNA, 23 nt, Artificial Sequence
  Description of Artificial Sequence: Synthetic oligonucleotide
uaagccagcgugccuuuucaauu

SEQ ID NO: 1009 - RNA, 23 nt, Artificial Sequence
  Description of Artificial Sequence: Synthetic oligonucleotide
uaauuucacccucaguauggagu

SEQ ID NO: 1010 - RNA, 23 nt, Artificial Sequence
  Description of Artificial Sequence: Synthetic oligonucleotide
ugaugggacacgcaggugaucac

SEQ ID NO: 1011 - RNA, 23 nt, Artificial Sequence
  Description of Artificial Sequence: Synthetic oligonucleotide
uagaucacaagccagcgugccuu

SEQ ID NO: 1012 - RNA, 23 nt, Artificial Sequence
  Description of Artificial Sequence: Synthetic oligonucleotide
ugaucacaagccagcgugccuuu

SEQ ID NO: 1013 - RNA, 23 nt, Artificial Sequence
  Description of Artificial Sequence: Synthetic oligonucleotide
uuggguuagaaaccucuuuacaa

SEQ ID NO: 1014 - RNA, 21 nt, Artificial Sequence
  Description of Artificial Sequence: Synthetic oligonucleotide
agcucgcauggucaguaaaaa

SEQ ID NO: 1015 - RNA, 21 nt, Artificial Sequence
  Description of Artificial Sequence: Synthetic oligonucleotide
cgcauggucaguaaaagcaaa

SEQ ID NO: 1016 - RNA, 21 nt, Artificial Sequence
  Description of Artificial Sequence: Synthetic oligonucleotide
gcucgcauggucaguaaaaga

SEQ ID NO: 1017 - RNA, 21 nt, Artificial Sequence
  Description of Artificial Sequence: Synthetic oligonucleotide
uugcaagucccaugauuucua

SEQ ID NO: 1018 - RNA, 21 nt, Artificial Sequence
  Description of Artificial Sequence: Synthetic oligonucleotide
gacucacuuuaucaauaguua

SEQ ID NO: 1019 - RNA, 21 nt, Artificial Sequence
  Description of Artificial Sequence: Synthetic oligonucleotide
aaaggacgcauguaucuugaa

SEQ ID NO: 1020 - RNA, 21 nt, Artificial Sequence
  Description of Artificial Sequence: Synthetic oligonucleotide
ucuugaaaugcuuguaaagaa

SEQ ID NO: 1021 - RNA, 21 nt, Artificial Sequence
  Description of Artificial Sequence: Synthetic oligonucleotide
caggcaauuccuuuugauuca

SEQ ID NO: 1022 - RNA, 21 nt, Artificial Sequence
  Description of Artificial Sequence: Synthetic oligonucleotide
gagggacaugaaaucaucuua

SEQ ID NO: 1023 - RNA, 21 nt, Artificial Sequence
  Description of Artificial Sequence: Synthetic oligonucleotide
ucugucugugaaugucuauaa

SEQ ID NO: 1024 - RNA, 21 nt, Artificial Sequence
  Description of Artificial Sequence: Synthetic oligonucleotide
gcacgcuggcuugugaucuua

SEQ ID NO: 1025 - RNA, 21 nt, Artificial Sequence
  Description of Artificial Sequence: Synthetic oligonucleotide
ugucugugaaugucuauauaa

SEQ ID NO: 1026 - RNA, 21 nt, Artificial Sequence
  Description of Artificial Sequence: Synthetic oligonucleotide
agggacaugaaaucaucuuaa

SEQ ID NO: 1027 - RNA, 21 nt, Artificial Sequence
  Description of Artificial Sequence: Synthetic oligonucleotide
gugaaugucuauauaguguaa

SEQ ID NO: 1028 - RNA, 21 nt, Artificial Sequence
  Description of Artificial Sequence: Synthetic oligonucleotide
uguguguuuuaacaaaugaua

SEQ ID NO: 1029 - RNA, 21 nt, Artificial Sequence
  Description of Artificial Sequence: Synthetic oligonucleotide
gcaagucccaugauuucuuca

SEQ ID NO: 1030 - RNA, 21 nt, Artificial Sequence
  Description of Artificial Sequence: Synthetic oligonucleotide
aaggacgcauguaucuugaaa

SEQ ID NO: 1031 - RNA, 21 nt, Artificial Sequence
  Description of Artificial Sequence: Synthetic oligonucleotide
gucugugaaugucuauauaga

SEQ ID NO: 1032 - RNA, 21 nt, Artificial Sequence
  Description of Artificial Sequence: Synthetic oligonucleotide
cuaaccaguucucuuuguaaa

SEQ ID NO: 1033 - RNA, 21 nt, Artificial Sequence
  Description of Artificial Sequence: Synthetic oligonucleotide
gacuguauccuguuugcuaua

SEQ ID NO: 1034 - RNA, 21 nt, Artificial Sequence
  Description of Artificial Sequence: Synthetic oligonucleotide
uauuguguguuuuaacaaaua

SEQ ID NO: 1035 - RNA, 21 nt, Artificial Sequence
  Description of Artificial Sequence: Synthetic oligonucleotide
guuggauuugucuguuuauga

SEQ ID NO: 1036 - RNA, 21 nt, Artificial Sequence
  Description of Artificial Sequence: Synthetic oligonucleotide
cugucugugaaugucuauaua

SEQ ID NO: 1037 - RNA, 21 nt, Artificial Sequence
  Description of Artificial Sequence: Synthetic oligonucleotide
gcagcaacaaaggauuugaaa

SEQ ID NO: 1038 - RNA, 21 nt, Artificial Sequence
  Description of Artificial Sequence: Synthetic oligonucleotide
gagcagcugaacauauacaua

SEQ ID NO: 1039 - RNA, 21 nt, Artificial Sequence
  Description of Artificial Sequence: Synthetic oligonucleotide
aucuugaaaugcuuguaaaga

SEQ ID NO: 1040 - RNA, 21 nt, Artificial Sequence
  Description of Artificial Sequence: Synthetic oligonucleotide
gaaugucuauauaguguauua

SEQ ID NO: 1041 - RNA, 21 nt, Artificial Sequence
  Description of Artificial Sequence: Synthetic oligonucleotide
acgcuggcuugugaucuuaaa

SEQ ID NO: 1042 - RNA, 21 nt, Artificial Sequence
  Description of Artificial Sequence: Synthetic oligonucleotide
gcuaaccaguucucuuuguaa

SEQ ID NO: 1043 - RNA, 21 nt, Artificial Sequence
  Description of Artificial Sequence: Synthetic oligonucleotide
cugacucacuuuaucaauaga

SEQ ID NO: 1044 - RNA, 21 nt, Artificial Sequence
  Description of Artificial Sequence: Synthetic oligonucleotide
uucugucugugaaugucuaua

SEQ ID NO: 1045 - RNA, 21 nt, Artificial Sequence
  Description of Artificial Sequence: Synthetic oligonucleotide
auuguguguuuuaacaaauga

SEQ ID NO: 1046 - RNA, 21 nt, Artificial Sequence
  Description of Artificial Sequence: Synthetic oligonucleotide
uaucuugaaaugcuuguaaaa

SEQ ID NO: 1047 - RNA, 21 nt, Artificial Sequence
  Description of Artificial Sequence: Synthetic oligonucleotide
ggagcagcugaacauauacaa

SEQ ID NO: 1048 - RNA, 21 nt, Artificial Sequence
  Description of Artificial Sequence: Synthetic oligonucleotide
auaguguauuguguguuuuaa

SEQ ID NO: 1049 - RNA, 21 nt, Artificial Sequence
  Description of Artificial Sequence: Synthetic oligonucleotide
gcauguaucuugaaaugcuua

SEQ ID NO: 1050 - RNA, 21 nt, Artificial Sequence
  Description of Artificial Sequence: Synthetic oligonucleotide
cuuguaaagagguuucuaaca

SEQ ID NO: 1051 - RNA, 21 nt, Artificial Sequence
  Description of Artificial Sequence: Synthetic oligonucleotide
ugaacauauacauagauguua

SEQ ID NO: 1052 - RNA, 21 nt, Artificial Sequence
  Description of Artificial Sequence: Synthetic oligonucleotide
uccacagaaacccuguuuuaa

SEQ ID NO: 1053 - RNA, 21 nt, Artificial Sequence
  Description of Artificial Sequence: Synthetic oligonucleotide
ggcuagauaggauauacugua

SEQ ID NO: 1054 - RNA, 21 nt, Artificial Sequence
  Description of Artificial Sequence: Synthetic oligonucleotide
caugaaaucaucuuagcuuaa

SEQ ID NO: 1055 - RNA, 21 nt, Artificial Sequence
  Description of Artificial Sequence: Synthetic oligonucleotide
uaguguauuguguguuuuaaa

SEQ ID NO: 1056 - RNA, 21 nt, Artificial Sequence
  Description of Artificial Sequence: Synthetic oligonucleotide
cagcugaacauauacauagaa

SEQ ID NO: 1057 - RNA, 21 nt, Artificial Sequence
  Description of Artificial Sequence: Synthetic oligonucleotide
agggcuaaccaguucucuuua

SEQ ID NO: 1058 - RNA, 21 nt, Artificial Sequence
  Description of Artificial Sequence: Synthetic oligonucleotide
aggacgcauguaucuugaaaa

SEQ ID NO: 1059 - RNA, 21 nt, Artificial Sequence
  Description of Artificial Sequence: Synthetic oligonucleotide
uggauuugucuguuuaugcua

SEQ ID NO: 1060 - RNA, 21 nt, Artificial Sequence
  Description of Artificial Sequence: Synthetic oligonucleotide
gcuuguaaagagguuucuaaa

SEQ ID NO: 1061 - RNA, 21 nt, Artificial Sequence
  Description of Artificial Sequence: Synthetic oligonucleotide
acagaaacccuguuuuauuga

SEQ ID NO: 1062 - RNA, 21 nt, Artificial Sequence
  Description of Artificial Sequence: Synthetic oligonucleotide
cacgcuggcuugugaucuuaa

SEQ ID NO: 1063 - RNA, 21 nt, Artificial Sequence
  Description of Artificial Sequence: Synthetic oligonucleotide
gcagcugaacauauacauaga

SEQ ID NO: 1064 - RNA, 21 nt, Artificial Sequence
  Description of Artificial Sequence: Synthetic oligonucleotide
augucuauauaguguauugua

SEQ ID NO: 1065 - RNA, 21 nt, Artificial Sequence
  Description of Artificial Sequence: Synthetic oligonucleotide
cugugaaugucuauauaguga

SEQ ID NO: 1066 - RNA, 21 nt, Artificial Sequence
  Description of Artificial Sequence: Synthetic oligonucleotide
uuguguguuuuaacaaaugaa

SEQ ID NO: 1067 - RNA, 21 nt, Artificial Sequence
  Description of Artificial Sequence: Synthetic oligonucleotide
uaaccaguucucuuuguaaga

SEQ ID NO: 1068 - RNA, 21 nt, Artificial Sequence
  Description of Artificial Sequence: Synthetic oligonucleotide
uaguuggauuugucuguuuaa

SEQ ID NO: 1069 - RNA, 21 nt, Artificial Sequence
  Description of Artificial Sequence: Synthetic oligonucleotide
ugaaaaggcacgcuggcuuga

SEQ ID NO: 1070 - RNA, 21 nt, Artificial Sequence
  Description of Artificial Sequence: Synthetic oligonucleotide
ugugaaugucuauauagugua

SEQ ID NO: 1071 - RNA, 21 nt, Artificial Sequence
  Description of Artificial Sequence: Synthetic oligonucleotide
gacgcauguaucuugaaauga

SEQ ID NO: 1072 - RNA, 21 nt, Artificial Sequence
  Description of Artificial Sequence: Synthetic oligonucleotide
caacaaaggauuugaaacuua

SEQ ID NO: 1073 - RNA, 21 nt, Artificial Sequence
  Description of Artificial Sequence: Synthetic oligonucleotide
ucugugaaugucuauauagua

SEQ ID NO: 1074 - RNA, 21 nt, Artificial Sequence
  Description of Artificial Sequence: Synthetic oligonucleotide
aguguauuguguguuuuaaca

SEQ ID NO: 1075 - RNA, 21 nt, Artificial Sequence
  Description of Artificial Sequence: Synthetic oligonucleotide
gauuucaaccacauuugcuaa

SEQ ID NO: 1076 - RNA, 21 nt, Artificial Sequence
  Description of Artificial Sequence: Synthetic oligonucleotide
uucaccagagugacuaugaua

SEQ ID NO: 1077 - RNA, 21 nt, Artificial Sequence
  Description of Artificial Sequence: Synthetic oligonucleotide
guggcagcaacaaaggauuua

SEQ ID NO: 1078 - RNA, 21 nt, Artificial Sequence
  Description of Artificial Sequence: Synthetic oligonucleotide
ggacgcauguaucuugaaaua

SEQ ID NO: 1079 - RNA, 21 nt, Artificial Sequence
  Description of Artificial Sequence: Synthetic oligonucleotide
uauccuguuugcuauugcuua

SEQ ID NO: 1080 - RNA, 21 nt, Artificial Sequence
  Description of Artificial Sequence: Synthetic oligonucleotide
uucucuucagcuuugaaaaga

SEQ ID NO: 1081 - RNA, 21 nt, Artificial Sequence
  Description of Artificial Sequence: Synthetic oligonucleotide
ucugguuuggguacaguuaaa

SEQ ID NO: 1082 - RNA, 21 nt, Artificial Sequence
  Description of Artificial Sequence: Synthetic oligonucleotide
cagcaacaaaggauuugaaaa

SEQ ID NO: 1083 - RNA, 21 nt, Artificial Sequence
  Description of Artificial Sequence: Synthetic oligonucleotide
aaaaggcacgcuggcuuguga

SEQ ID NO: 1084 - RNA, 21 nt, Artificial Sequence
  Description of Artificial Sequence: Synthetic oligonucleotide
ugccucguaacccuuuucaua

SEQ ID NO: 1085 - RNA, 21 nt, Artificial Sequence
  Description of Artificial Sequence: Synthetic oligonucleotide
aaaggcacgcuggcuugugaa

SEQ ID NO: 1086 - RNA, 21 nt, Artificial Sequence
  Description of Artificial Sequence: Synthetic oligonucleotide
cagaaacccuguuuuauugaa

SEQ ID NO: 1087 - RNA, 21 nt, Artificial Sequence
  Description of Artificial Sequence: Synthetic oligonucleotide
gaaaaggcacgcuggcuugua

SEQ ID NO: 1088 - RNA, 21 nt, Artificial Sequence
  Description of Artificial Sequence: Synthetic oligonucleotide
ugguuuggguacaguuaaaga

SEQ ID NO: 1089 - RNA, 21 nt, Artificial Sequence
  Description of Artificial Sequence: Synthetic oligonucleotide
aaggcacgcuggcuugugaua

SEQ ID NO: 1090 - RNA, 21 nt, Artificial Sequence
  Description of Artificial Sequence: Synthetic oligonucleotide
cauacugagggugaaauuaaa

SEQ ID NO: 1091 - RNA, 21 nt, Artificial Sequence
  Description of Artificial Sequence: Synthetic oligonucleotide
gcugacucacuuuaucaauaa

SEQ ID NO: 1092 - RNA, 21 nt, Artificial Sequence
  Description of Artificial Sequence: Synthetic oligonucleotide
uucugguuuggguacaguuaa

SEQ ID NO: 1093 - RNA, 21 nt, Artificial Sequence
  Description of Artificial Sequence: Synthetic oligonucleotide
cugguuuggguacaguuaaaa

SEQ ID NO: 1094 - RNA, 21 nt, Artificial Sequence
  Description of Artificial Sequence: Synthetic oligonucleotide
gcuagauaggauauacuguaa

SEQ ID NO: 1095 - RNA, 21 nt, Artificial Sequence
  Description of Artificial Sequence: Synthetic oligonucleotide
cucauuacugccaacaguuua

SEQ ID NO: 1096 - RNA, 21 nt, Artificial Sequence
  Description of Artificial Sequence: Synthetic oligonucleotide
ccauacugagggugaaauuaa

SEQ ID NO: 1097 - RNA, 21 nt, Artificial Sequence
  Description of Artificial Sequence: Synthetic oligonucleotide
cagccuaagaucaugguuuaa

SEQ ID NO: 1098 - RNA, 21 nt, Artificial Sequence
  Description of Artificial Sequence: Synthetic oligonucleotide
aagagguuucuaacccaccca

SEQ ID NO: 1099 - RNA, 21 nt, Artificial Sequence
  Description of Artificial Sequence: Synthetic oligonucleotide
ugacucacuuuaucaauagua

SEQ ID NO: 1100 - RNA, 21 nt, Artificial Sequence
  Description of Artificial Sequence: Synthetic oligonucleotide
uguaaagagguuucuaaccca

SEQ ID NO: 1101 - RNA, 21 nt, Artificial Sequence
  Description of Artificial Sequence: Synthetic oligonucleotide
uugaaaaggcacgcuggcuua

SEQ ID NO: 1102 - RNA, 21 nt, Artificial Sequence
  Description of Artificial Sequence: Synthetic oligonucleotide
uccauacugagggugaaauua

SEQ ID NO: 1103 - RNA, 21 nt, Artificial Sequence
  Description of Artificial Sequence: Synthetic oligonucleotide
gaucaccugcgugucccauca

SEQ ID NO: 1104 - RNA, 21 nt, Artificial Sequence
  Description of Artificial Sequence: Synthetic oligonucleotide
ggcacgcuggcuugugaucua

SEQ ID NO: 1105 - RNA, 21 nt, Artificial Sequence
  Description of Artificial Sequence: Synthetic oligonucleotide
aggcacgcuggcuugugauca

SEQ ID NO: 1106 - RNA, 21 nt, Artificial Sequence
  Description of Artificial Sequence: Synthetic oligonucleotide
guaaagagguuucuaacccaa

SEQ ID NO: 1107 - RNA, 23 nt, Artificial Sequence
  Description of Artificial Sequence: Synthetic oligonucleotide
uuuuuacugaccaugcgagcuug

SEQ ID NO: 1108 - RNA, 23 nt, Artificial Sequence
  Description of Artificial Sequence: Synthetic oligonucleotide
uuugcuuuuacugaccaugcgag

SEQ ID NO: 1109 - RNA, 23 nt, Artificial Sequence
  Description of Artificial Sequence: Synthetic oligonucleotide
ucuuuuacugaccaugcgagcuu

SEQ ID NO: 1110 - RNA, 23 nt, Artificial Sequence
  Description of Artificial Sequence: Synthetic oligonucleotide
uagaaaucaugggacuugcaagu

SEQ ID NO: 1111 - RNA, 23 nt, Artificial Sequence
  Description of Artificial Sequence: Synthetic oligonucleotide
uaacuauugauaaagugagucag

SEQ ID NO: 1112 - RNA, 23 nt, Artificial Sequence
  Description of Artificial Sequence: Synthetic oligonucleotide
uucaagauacaugcguccuuuuu

SEQ ID NO: 1113 - RNA, 23 nt, Artificial Sequence
  Description of Artificial Sequence: Synthetic oligonucleotide
uucuuuacaagcauuucaagaua

SEQ ID NO: 1114 - RNA, 23 nt, Artificial Sequence
  Description of Artificial Sequence: Synthetic oligonucleotide
ugaaucaaaaggaauugccugag

SEQ ID NO: 1115 - RNA, 23 nt, Artificial Sequence
  Description of Artificial Sequence: Synthetic oligonucleotide
uaagaugauuucaugucccuccc

SEQ ID NO: 1116 - RNA, 23 nt, Artificial Sequence
  Description of Artificial Sequence: Synthetic oligonucleotide
uuauagacauucacagacagaaa

SEQ ID NO: 1117 - RNA, 23 nt, Artificial Sequence
  Description of Artificial Sequence: Synthetic oligonucleotide
uaagaucacaagccagcgugccu

SEQ ID NO: 1118 - RNA, 23 nt, Artificial Sequence
  Description of Artificial Sequence: Synthetic oligonucleotide
uuauauagacauucacagacaga

SEQ ID NO: 1119 - RNA, 23 nt, Artificial Sequence
  Description of Artificial Sequence: Synthetic oligonucleotide
uuaagaugauuucaugucccucc

SEQ ID NO: 1120 - RNA, 23 nt, Artificial Sequence
  Description of Artificial Sequence: Synthetic oligonucleotide
uuacacuauauagacauucacag

SEQ ID NO: 1121 - RNA, 23 nt, Artificial Sequence
  Description of Artificial Sequence: Synthetic oligonucleotide
uaucauuuguuaaaacacacaau

SEQ ID NO: 1122 - RNA, 23 nt, Artificial Sequence
  Description of Artificial Sequence: Synthetic oligonucleotide
ugaagaaaucaugggacuugcaa

SEQ ID NO: 1123 - RNA, 23 nt, Artificial Sequence
  Description of Artificial Sequence: Synthetic oligonucleotide
uuucaagauacaugcguccuuuu

SEQ ID NO: 1124 - RNA, 23 nt, Artificial Sequence
  Description of Artificial Sequence: Synthetic oligonucleotide
ucuauauagacauucacagacag

SEQ ID NO: 1125 - RNA, 23 nt, Artificial Sequence
  Description of Artificial Sequence: Synthetic oligonucleotide
uuuacaaagagaacugguuagcc

SEQ ID NO: 1126 - RNA, 23 nt, Artificial Sequence
  Description of Artificial Sequence: Synthetic oligonucleotide
uauagcaaacaggauacagucuc

SEQ ID NO: 1127 - RNA, 23 nt, Artificial Sequence
  Description of Artificial Sequence: Synthetic oligonucleotide
uauuuguuaaaacacacaauaca

SEQ ID NO: 1128 - RNA, 23 nt, Artificial Sequence
  Description of Artificial Sequence: Synthetic oligonucleotide
ucauaaacagacaaauccaacua

SEQ ID NO: 1129 - RNA, 23 nt, Artificial Sequence
  Description of Artificial Sequence: Synthetic oligonucleotide
uauauagacauucacagacagaa

SEQ ID NO: 1130 - RNA, 23 nt, Artificial Sequence
  Description of Artificial Sequence: Synthetic oligonucleotide
uuucaaauccuuuguugcugcca

SEQ ID NO: 1131 - RNA, 23 nt, Artificial Sequence
  Description of Artificial Sequence: Synthetic oligonucleotide
uauguauauguucagcugcucca

SEQ ID NO: 1132 - RNA, 23 nt, Artificial Sequence
  Description of Artificial Sequence: Synthetic oligonucleotide
ucuuuacaagcauuucaagauac

SEQ ID NO: 1133 - RNA, 23 nt, Artificial Sequence
  Description of Artificial Sequence: Synthetic oligonucleotide
uaauacacuauauagacauucac

SEQ ID NO: 1134 - RNA, 23 nt, Artificial Sequence
  Description of Artificial Sequence: Synthetic oligonucleotide
uuuaagaucacaagccagcgugc

SEQ ID NO: 1135 - RNA, 23 nt, Artificial Sequence
  Description of Artificial Sequence: Synthetic oligonucleotide
uuacaaagagaacugguuagccc

SEQ ID NO: 1136 - RNA, 23 nt, Artificial Sequence
  Description of Artificial Sequence: Synthetic oligonucleotide
ucuauugauaaagugagucagca

SEQ ID NO: 1137 - RNA, 23 nt, Artificial Sequence
  Description of Artificial Sequence: Synthetic oligonucleotide
uauagacauucacagacagaaag

SEQ ID NO: 1138 - RNA, 23 nt, Artificial Sequence
  Description of Artificial Sequence: Synthetic oligonucleotide
ucauuuguuaaaacacacaauac

SEQ ID NO: 1139 - RNA, 23 nt, Artificial Sequence
  Description of Artificial Sequence: Synthetic oligonucleotide
uuuuacaagcauuucaagauaca

SEQ ID NO: 1140 - RNA, 23 nt, Artificial Sequence
  Description of Artificial Sequence: Synthetic oligonucleotide
uuguauauguucagcugcuccag

SEQ ID NO: 1141 - RNA, 23 nt, Artificial Sequence
  Description of Artificial Sequence: Synthetic oligonucleotide
uuaaaacacacaauacacuauau

SEQ ID NO: 1142 - RNA, 23 nt, Artificial Sequence
  Description of Artificial Sequence: Synthetic oligonucleotide
uaagcauuucaagauacaugcgu

SEQ ID NO: 1143 - RNA, 23 nt, Artificial Sequence
  Description of Artificial Sequence: Synthetic oligonucleotide
uguuagaaaccucuuuacaagca

SEQ ID NO: 1144 - RNA, 23 nt, Artificial Sequence
  Description of Artificial Sequence: Synthetic oligonucleotide
uaacaucuauguauauguucagc

SEQ ID NO: 1145 - RNA, 23 nt, Artificial Sequence
  Description of Artificial Sequence: Synthetic oligonucleotide
uuaaaacaggguuucuguggagc

SEQ ID NO: 1146 - RNA, 23 nt, Artificial Sequence
  Description of Artificial Sequence: Synthetic oligonucleotide
uacaguauauccuaucuagccca

SEQ ID NO: 1147 - RNA, 23 nt, Artificial Sequence
  Description of Artificial Sequence: Synthetic oligonucleotide
uuaagcuaagaugauuucauguc

SEQ ID NO: 1148 - RNA, 23 nt, Artificial Sequence
  Description of Artificial Sequence: Synthetic oligonucleotide
uuuaaaacacacaauacacuaua

SEQ ID NO: 1149 - RNA, 23 nt, Artificial Sequence
  Description of Artificial Sequence: Synthetic oligonucleotide
uucuauguauauguucagcugcu

SEQ ID NO: 1150 - RNA, 23 nt, Artificial Sequence
  Description of Artificial Sequence: Synthetic oligonucleotide
uaaagagaacugguuagcccuaa

SEQ ID NO: 1151 - RNA, 23 nt, Artificial Sequence
  Description of Artificial Sequence: Synthetic oligonucleotide
uuuucaagauacaugcguccuuu

SEQ ID NO: 1152 - RNA, 23 nt, Artificial Sequence
  Description of Artificial Sequence: Synthetic oligonucleotide
uagcauaaacagacaaauccaac

SEQ ID NO: 1153 - RNA, 23 nt, Artificial Sequence
  Description of Artificial Sequence: Synthetic oligonucleotide
uuuagaaaccucuuuacaagcau

SEQ ID NO: 1154 - RNA, 23 nt, Artificial Sequence
  Description of Artificial Sequence: Synthetic oligonucleotide
ucaauaaaacaggguuucugugg

SEQ ID NO: 1155 - RNA, 23 nt, Artificial Sequence
  Description of Artificial Sequence: Synthetic oligonucleotide
uuaagaucacaagccagcgugcc

SEQ ID NO: 1156 - RNA, 23 nt, Artificial Sequence
  Description of Artificial Sequence: Synthetic oligonucleotide
ucuauguauauguucagcugcuc

SEQ ID NO: 1157 - RNA, 23 nt, Artificial Sequence
  Description of Artificial Sequence: Synthetic oligonucleotide
uacaauacacuauauagacauuc

SEQ ID NO: 1158 - RNA, 23 nt, Artificial Sequence
  Description of Artificial Sequence: Synthetic oligonucleotide
ucacuauauagacauucacagac

SEQ ID NO: 1159 - RNA, 23 nt, Artificial Sequence
  Description of Artificial Sequence: Synthetic oligonucleotide
uucauuuguuaaaacacacaaua

SEQ ID NO: 1160 - RNA, 23 nt, Artificial Sequence
  Description of Artificial Sequence: Synthetic oligonucleotide
ucuuacaaagagaacugguuagc

SEQ ID NO: 1161 - RNA, 23 nt, Artificial Sequence
  Description of Artificial Sequence: Synthetic oligonucleotide
uuaaacagacaaauccaacuaca

SEQ ID NO: 1162 - RNA, 23 nt, Artificial Sequence
  Description of Artificial Sequence: Synthetic oligonucleotide
ucaagccagcgugccuuuucaau

SEQ ID NO: 1163 - RNA, 23 nt, Artificial Sequence
  Description of Artificial Sequence: Synthetic oligonucleotide
uacacuauauagacauucacaga

SEQ ID NO: 1164 - RNA, 23 nt, Artificial Sequence
  Description of Artificial Sequence: Synthetic oligonucleotide
ucauuucaagauacaugcguccu

SEQ ID NO: 1165 - RNA, 23 nt, Artificial Sequence
  Description of Artificial Sequence: Synthetic oligonucleotide
uaaguuucaaauccuuuguugcu

SEQ ID NO: 1166 - RNA, 23 nt, Artificial Sequence
  Description of Artificial Sequence: Synthetic oligonucleotide
uacuauauagacauucacagaca

SEQ ID NO: 1167 - RNA, 23 nt, Artificial Sequence
  Description of Artificial Sequence: Synthetic oligonucleotide
uguuaaaacacacaauacacuau

SEQ ID NO: 1168 - RNA, 23 nt, Artificial Sequence
  Description of Artificial Sequence: Synthetic oligonucleotide
uuagcaaaugugguugaaaucau

SEQ ID NO: 1169 - RNA, 23 nt, Artificial Sequence
  Description of Artificial Sequence: Synthetic oligonucleotide
uaucauagucacucuggugaauc

SEQ ID NO: 1170 - RNA, 23 nt, Artificial Sequence
  Description of Artificial Sequence: Synthetic oligonucleotide
uaaauccuuuguugcugccacug

SEQ ID NO: 1171 - RNA, 23 nt, Artificial Sequence
  Description of Artificial Sequence: Synthetic oligonucleotide
uauuucaagauacaugcguccuu

SEQ ID NO: 1172 - RNA, 23 nt, Artificial Sequence
  Description of Artificial Sequence: Synthetic oligonucleotide
uaagcaauagcaaacaggauaca

SEQ ID NO: 1173 - RNA, 23 nt, Artificial Sequence
  Description of Artificial Sequence: Synthetic oligonucleotide
ucuuuucaaagcugaagagaaau

SEQ ID NO: 1174 - RNA, 23 nt, Artificial Sequence
  Description of Artificial Sequence: Synthetic oligonucleotide
uuuaacuguacccaaaccagaag

SEQ ID NO: 1175 - RNA, 23 nt, Artificial Sequence
  Description of Artificial Sequence: Synthetic oligonucleotide
uuuucaaauccuuuguugcugcc

SEQ ID NO: 1176 - RNA, 23 nt, Artificial Sequence
  Description of Artificial Sequence: Synthetic oligonucleotide
ucacaagccagcgugccuuuuca

SEQ ID NO: 1177 - RNA, 23 nt, Artificial Sequence
  Description of Artificial Sequence: Synthetic oligonucleotide
uaugaaaaggguuacgaggcagu

SEQ ID NO: 1178 - RNA, 23 nt, Artificial Sequence
  Description of Artificial Sequence: Synthetic oligonucleotide
uucacaagccagcgugccuuuuc

SEQ ID NO: 1179 - RNA, 23 nt, Artificial Sequence
  Description of Artificial Sequence: Synthetic oligonucleotide
uucaauaaaacaggguuucugug

SEQ ID NO: 1180 - RNA, 23 nt, Artificial Sequence
  Description of Artificial Sequence: Synthetic oligonucleotide
uacaagccagcgugccuuuucaa

SEQ ID NO: 1181 - RNA, 23 nt, Artificial Sequence
  Description of Artificial Sequence: Synthetic oligonucleotide
ucuuuaacuguacccaaaccaga

SEQ ID NO: 1182 - RNA, 23 nt, Artificial Sequence
  Description of Artificial Sequence: Synthetic oligonucleotide
uaucacaagccagcgugccuuuu

SEQ ID NO: 1183 - RNA, 23 nt, Artificial Sequence
  Description of Artificial Sequence: Synthetic oligonucleotide
uuuaauuucacccucaguaugga

SEQ ID NO: 1184 - RNA, 23 nt, Artificial Sequence
  Description of Artificial Sequence: Synthetic oligonucleotide
uuauugauaaagugagucagcag

SEQ ID NO: 1185 - RNA, 23 nt, Artificial Sequence
  Description of Artificial Sequence: Synthetic oligonucleotide
uuaacuguacccaaaccagaagu

SEQ ID NO: 1186 - RNA, 23 nt, Artificial Sequence
  Description of Artificial Sequence: Synthetic oligonucleotide
uuuuaacuguacccaaaccagaa

SEQ ID NO: 1187 - RNA, 23 nt, Artificial Sequence
  Description of Artificial Sequence: Synthetic oligonucleotide
uuacaguauauccuaucuagccc

SEQ ID NO: 1188 - RNA, 23 nt, Artificial Sequence
  Description of Artificial Sequence: Synthetic oligonucleotide
uaaacuguuggcaguaaugaggg

SEQ ID NO: 1189 - RNA, 23 nt, Artificial Sequence
  Description of Artificial Sequence: Synthetic oligonucleotide
uuaauuucacccucaguauggag

SEQ ID NO: 1190 - RNA, 23 nt, Artificial Sequence
  Description of Artificial Sequence: Synthetic oligonucleotide
uuaaaccaugaucuuaggcuggc

SEQ ID NO: 1191 - RNA, 23 nt, Artificial Sequence
  Description of Artificial Sequence: Synthetic oligonucleotide
uggguggguuagaaaccucuuua

SEQ ID NO: 1192 - RNA, 23 nt, Artificial Sequence
  Description of Artificial Sequence: Synthetic oligonucleotide
uacuauugauaaagugagucagc

SEQ ID NO: 1193 - RNA, 23 nt, Artificial Sequence
  Description of Artificial Sequence: Synthetic oligonucleotide
uggguuagaaaccucuuuacaag

SEQ ID NO: 1194 - RNA, 23 nt, Artificial Sequence
  Description of Artificial Sequence: Synthetic oligonucleotide
uaagccagcgugccuuuucaauu

SEQ ID NO: 1195 - RNA, 23 nt, Artificial Sequence
  Description of Artificial Sequence: Synthetic oligonucleotide
uaauuucacccucaguauggagu

SEQ ID NO: 1196 - RNA, 23 nt, Artificial Sequence
  Description of Artificial Sequence: Synthetic oligonucleotide
ugaugggacacgcaggugaucac

SEQ ID NO: 1197 - RNA, 23 nt, Artificial Sequence
  Description of Artificial Sequence: Synthetic oligonucleotide
uagaucacaagccagcgugccuu

SEQ ID NO: 1198 - RNA, 23 nt, Artificial Sequence
  Description of Artificial Sequence: Synthetic oligonucleotide
ugaucacaagccagcgugccuuu

SEQ ID NO: 1199 - RNA, 23 nt, Artificial Sequence
  Description of Artificial Sequence: Synthetic oligonucleotide
uuggguuagaaaccucuuuacaa

SEQ ID NO: 1200 - RNA, 23 nt, Artificial Sequence
  Description of Artificial Sequence: Synthetic oligonucleotide
caagcucgcauggucaguaaaag

SEQ ID NO: 1201 - RNA, 23 nt, Artificial Sequence
  Description of Artificial Sequence: Synthetic oligonucleotide
cucgcauggucaguaaaagcaaa

SEQ ID NO: 1202 - RNA, 23 nt, Artificial Sequence
  Description of Artificial Sequence: Synthetic oligonucleotide
aagcucgcauggucaguaaaagc

SEQ ID NO: 1203 - RNA, 23 nt, Artificial Sequence
  Description of Artificial Sequence: Synthetic oligonucleotide
acuugcaagucccaugauuucuu

SEQ ID NO: 1204 - RNA, 23 nt, Artificial Sequence
  Description of Artificial Sequence: Synthetic oligonucleotide
cugacucacuuuaucaauaguuc

SEQ ID NO: 1205 - RNA, 23 nt, Artificial Sequence
  Description of Artificial Sequence: Synthetic oligonucleotide
aaaaaggacgcauguaucuugaa

SEQ ID NO: 1206 - RNA, 23 nt, Artificial Sequence
  Description of Artificial Sequence: Synthetic oligonucleotide
uaucuugaaaugcuuguaaagag

SEQ ID NO: 1207 - RNA, 23 nt, Artificial Sequence
  Description of Artificial Sequence: Synthetic oligonucleotide
cucaggcaauuccuuuugauucu

SEQ ID NO: 1208 - RNA, 23 nt, Artificial Sequence
  Description of Artificial Sequence: Synthetic oligonucleotide
gggagggacaugaaaucaucuua

SEQ ID NO: 1209 - RNA, 23 nt, Artificial Sequence
  Description of Artificial Sequence: Synthetic oligonucleotide
uuucugucugugaaugucuauau

SEQ ID NO: 1210 - RNA, 23 nt, Artificial Sequence
  Description of Artificial Sequence: Synthetic oligonucleotide
aggcacgcuggcuugugaucuua

SEQ ID NO: 1211 - RNA, 23 nt, Artificial Sequence
  Description of Artificial Sequence: Synthetic oligonucleotide
ucugucugugaaugucuauauag

SEQ ID NO: 1212 - RNA, 23 nt, Artificial Sequence
  Description of Artificial Sequence: Synthetic oligonucleotide
ggagggacaugaaaucaucuuag

SEQ ID NO: 1213 - RNA, 23 nt, Artificial Sequence
  Description of Artificial Sequence: Synthetic oligonucleotide
cugugaaugucuauauaguguau

SEQ ID NO: 1214 - RNA, 23 nt, Artificial Sequence
  Description of Artificial Sequence: Synthetic oligonucleotide
auuguguguuuuaacaaaugauu

SEQ ID NO: 1215 - RNA, 23 nt, Artificial Sequence
  Description of Artificial Sequence: Synthetic oligonucleotide
uugcaagucccaugauuucuucg

SEQ ID NO: 1216 - RNA, 23 nt, Artificial Sequence
  Description of Artificial Sequence: Synthetic oligonucleotide
aaaaggacgcauguaucuugaaa

SEQ ID NO: 1217 - RNA, 23 nt, Artificial Sequence
  Description of Artificial Sequence: Synthetic oligonucleotide
cugucugugaaugucuauauagu

SEQ ID NO: 1218 - RNA, 23 nt, Artificial Sequence
  Description of Artificial Sequence: Synthetic oligonucleotide
ggcuaaccaguucucuuuguaag

SEQ ID NO: 1219 - RNA, 23 nt, Artificial Sequence
  Description of Artificial Sequence: Synthetic oligonucleotide
gagacuguauccuguuugcuauu

SEQ ID NO: 1220 - RNA, 23 nt, Artificial Sequence
  Description of Artificial Sequence: Synthetic oligonucleotide
uguauuguguguuuuaacaaaug

SEQ ID NO: 1221 - RNA, 23 nt, Artificial Sequence
  Description of Artificial Sequence: Synthetic oligonucleotide
uaguuggauuugucuguuuaugc

SEQ ID NO: 1222 - RNA, 23 nt, Artificial Sequence
  Description of Artificial Sequence: Synthetic oligonucleotide
uucugucugugaaugucuauaua

SEQ ID NO: 1223 - RNA, 23 nt, Artificial Sequence
  Description of Artificial Sequence: Synthetic oligonucleotide
uggcagcaacaaaggauuugaaa

SEQ ID NO: 1224 - RNA, 23 nt, Artificial Sequence
  Description of Artificial Sequence: Synthetic oligonucleotide
uggagcagcugaacauauacaua

SEQ ID NO: 1225 - RNA, 23 nt, Artificial Sequence
  Description of Artificial Sequence: Synthetic oligonucleotide
guaucuugaaaugcuuguaaaga

SEQ ID NO: 1226 - RNA, 23 nt, Artificial Sequence
  Description of Artificial Sequence: Synthetic oligonucleotide
gugaaugucuauauaguguauug

SEQ ID NO: 1227 - RNA, 23 nt, Artificial Sequence
  Description of Artificial Sequence: Synthetic oligonucleotide
gcacgcuggcuugugaucuuaaa

SEQ ID NO: 1228 - RNA, 23 nt, Artificial Sequence
  Description of Artificial Sequence: Synthetic oligonucleotide
gggcuaaccaguucucuuuguaa

SEQ ID NO: 1229 - RNA, 23 nt, Artificial Sequence
  Description of Artificial Sequence: Synthetic oligonucleotide
ugcugacucacuuuaucaauagu

SEQ ID NO: 1230 - RNA, 23 nt, Artificial Sequence
  Description of Artificial Sequence: Synthetic oligonucleotide
cuuucugucugugaaugucuaua

SEQ ID NO: 1231 - RNA, 23 nt, Artificial Sequence
  Description of Artificial Sequence: Synthetic oligonucleotide
guauuguguguuuuaacaaauga

SEQ ID NO: 1232 - RNA, 23 nt, Artificial Sequence
  Description of Artificial Sequence: Synthetic oligonucleotide
uguaucuugaaaugcuuguaaag

SEQ ID NO: 1233 - RNA, 23 nt, Artificial Sequence
  Description of Artificial Sequence: Synthetic oligonucleotide
cuggagcagcugaacauauacau

SEQ ID NO: 1234 - RNA, 23 nt, Artificial Sequence
  Description of Artificial Sequence: Synthetic oligonucleotide
auauaguguauuguguguuuuaa

SEQ ID NO: 1235 - RNA, 23 nt, Artificial Sequence
  Description of Artificial Sequence: Synthetic oligonucleotide
acgcauguaucuugaaaugcuug

SEQ ID NO: 1236 - RNA, 23 nt, Artificial Sequence
  Description of Artificial Sequence: Synthetic oligonucleotide
ugcuuguaaagagguuucuaacc

SEQ ID NO: 1237 - RNA, 23 nt, Artificial Sequence
  Description of Artificial Sequence: Synthetic oligonucleotide
gcugaacauauacauagauguug

SEQ ID NO: 1238 - RNA, 23 nt, Artificial Sequence
  Description of Artificial Sequence: Synthetic oligonucleotide
gcuccacagaaacccuguuuuau

SEQ ID NO: 1239 - RNA, 23 nt, Artificial Sequence
  Description of Artificial Sequence: Synthetic oligonucleotide
ugggcuagauaggauauacugua

SEQ ID NO: 1240 - RNA, 23 nt, Artificial Sequence
  Description of Artificial Sequence: Synthetic oligonucleotide
gacaugaaaucaucuuagcuuag

SEQ ID NO: 1241 - RNA, 23 nt, Artificial Sequence
  Description of Artificial Sequence: Synthetic oligonucleotide
uauaguguauuguguguuuuaac

SEQ ID NO: 1242 - RNA, 23 nt, Artificial Sequence
  Description of Artificial Sequence: Synthetic oligonucleotide
agcagcugaacauauacauagau

SEQ ID NO: 1243 - RNA, 23 nt, Artificial Sequence
  Description of Artificial Sequence: Synthetic oligonucleotide
uuagggcuaaccaguucucuuug

SEQ ID NO: 1244 - RNA, 23 nt, Artificial Sequence
  Description of Artificial Sequence: Synthetic oligonucleotide
aaaggacgcauguaucuugaaau

SEQ ID NO: 1245 - RNA, 23 nt, Artificial Sequence
  Description of Artificial Sequence: Synthetic oligonucleotide
guuggauuugucuguuuaugcuu

SEQ ID NO: 1246 - RNA, 23 nt, Artificial Sequence
  Description of Artificial Sequence: Synthetic oligonucleotide
augcuuguaaagagguuucuaac

SEQ ID NO: 1247 - RNA, 23 nt, Artificial Sequence
  Description of Artificial Sequence: Synthetic oligonucleotide
ccacagaaacccuguuuuauuga

SEQ ID NO: 1248 - RNA, 23 nt, Artificial Sequence
  Description of Artificial Sequence: Synthetic oligonucleotide
ggcacgcuggcuugugaucuuaa

SEQ ID NO: 1249 - RNA, 23 nt, Artificial Sequence
  Description of Artificial Sequence: Synthetic oligonucleotide
gagcagcugaacauauacauaga

SEQ ID NO: 1250 - RNA, 23 nt, Artificial Sequence
  Description of Artificial Sequence: Synthetic oligonucleotide
gaaugucuauauaguguauugug

SEQ ID NO: 1251 - RNA, 23 nt, Artificial Sequence
  Description of Artificial Sequence: Synthetic oligonucleotide
gucugugaaugucuauauagugu

SEQ ID NO: 1252 - RNA, 23 nt, Artificial Sequence
  Description of Artificial Sequence: Synthetic oligonucleotide
uauuguguguuuuaacaaaugau

SEQ ID NO: 1253 - RNA, 23 nt, Artificial Sequence
  Description of Artificial Sequence: Synthetic oligonucleotide
gcuaaccaguucucuuuguaagg

SEQ ID NO: 1254 - RNA, 23 nt, Artificial Sequence
  Description of Artificial Sequence: Synthetic oligonucleotide
uguaguuggauuugucuguuuau

SEQ ID NO: 1255 - RNA, 23 nt, Artificial Sequence
  Description of Artificial Sequence: Synthetic oligonucleotide
auugaaaaggcacgcuggcuugu

SEQ ID NO: 1256 - RNA, 23 nt, Artificial Sequence
  Description of Artificial Sequence: Synthetic oligonucleotide
ucugugaaugucuauauagugua

SEQ ID NO: 1257 - RNA, 23 nt, Artificial Sequence
  Description of Artificial Sequence: Synthetic oligonucleotide
aggacgcauguaucuugaaaugc

SEQ ID NO: 1258 - RNA, 23 nt, Artificial Sequence
  Description of Artificial Sequence: Synthetic oligonucleotide
agcaacaaaggauuugaaacuug

SEQ ID NO: 1259 - RNA, 23 nt, Artificial Sequence
  Description of Artificial Sequence: Synthetic oligonucleotide
ugucugugaaugucuauauagug

SEQ ID NO: 1260 - RNA, 23 nt, Artificial Sequence
  Description of Artificial Sequence: Synthetic oligonucleotide
auaguguauuguguguuuuaaca

SEQ ID NO: 1261 - RNA, 23 nt, Artificial Sequence
  Description of Artificial Sequence: Synthetic oligonucleotide
augauuucaaccacauuugcuag

SEQ ID NO: 1262 - RNA, 23 nt, Artificial Sequence
  Description of Artificial Sequence: Synthetic oligonucleotide
gauucaccagagugacuaugaua

SEQ ID NO: 1263 - RNA, 23 nt, Artificial Sequence
  Description of Artificial Sequence: Synthetic oligonucleotide
caguggcagcaacaaaggauuug

SEQ ID NO: 1264 - RNA, 23 nt, Artificial Sequence
  Description of Artificial Sequence: Synthetic oligonucleotide
aaggacgcauguaucuugaaaua

SEQ ID NO: 1265 - RNA, 23 nt, Artificial Sequence
  Description of Artificial Sequence: Synthetic oligonucleotide
uguauccuguuugcuauugcuug

SEQ ID NO: 1266 - RNA, 23 nt, Artificial Sequence
  Description of Artificial Sequence: Synthetic oligonucleotide
auuucucuucagcuuugaaaagg

SEQ ID NO: 1267 - RNA, 23 nt, Artificial Sequence
  Description of Artificial Sequence: Synthetic oligonucleotide
cuucugguuuggguacaguuaaa

SEQ ID NO: 1268 - RNA, 23 nt, Artificial Sequence
  Description of Artificial Sequence: Synthetic oligonucleotide
ggcagcaacaaaggauuugaaac

SEQ ID NO: 1269 - RNA, 23 nt, Artificial Sequence
  Description of Artificial Sequence: Synthetic oligonucleotide
ugaaaaggcacgcuggcuuguga

SEQ ID NO: 1270 - RNA, 23 nt, Artificial Sequence
  Description of Artificial Sequence: Synthetic oligonucleotide
acugccucguaacccuuuucaug

SEQ ID NO: 1271 - RNA, 23 nt, Artificial Sequence
  Description of Artificial Sequence: Synthetic oligonucleotide
gaaaaggcacgcuggcuugugau

SEQ ID NO: 1272 - RNA, 23 nt, Artificial Sequence
  Description of Artificial Sequence: Synthetic oligonucleotide
cacagaaacccuguuuuauugag

SEQ ID NO: 1273 - RNA, 23 nt, Artificial Sequence
  Description of Artificial Sequence: Synthetic oligonucleotide
uugaaaaggcacgcuggcuugug

SEQ ID NO: 1274 - RNA, 23 nt, Artificial Sequence
  Description of Artificial Sequence: Synthetic oligonucleotide
ucugguuuggguacaguuaaagg

SEQ ID NO: 1275 - RNA, 23 nt, Artificial Sequence
  Description of Artificial Sequence: Synthetic oligonucleotide
aaaaggcacgcuggcuugugauc

SEQ ID NO: 1276 - RNA, 23 nt, Artificial Sequence
  Description of Artificial Sequence: Synthetic oligonucleotide
uccauacugagggugaaauuaag

SEQ ID NO: 1277 - RNA, 23 nt, Artificial Sequence
  Description of Artificial Sequence: Synthetic oligonucleotide
cugcugacucacuuuaucaauag

SEQ ID NO: 1278 - RNA, 23 nt, Artificial Sequence
  Description of Artificial Sequence: Synthetic oligonucleotide
acuucugguuuggguacaguuaa

SEQ ID NO: 1279 - RNA, 23 nt, Artificial Sequence
  Description of Artificial Sequence: Synthetic oligonucleotide
uucugguuuggguacaguuaaag

SEQ ID NO: 1280 - RNA, 23 nt, Artificial Sequence
  Description of Artificial Sequence: Synthetic oligonucleotide
gggcuagauaggauauacuguau

SEQ ID NO: 1281 - RNA, 23 nt, Artificial Sequence
  Description of Artificial Sequence: Synthetic oligonucleotide
cccucauuacugccaacaguuuc

SEQ ID NO: 1282 - RNA, 23 nt, Artificial Sequence
  Description of Artificial Sequence: Synthetic oligonucleotide
cuccauacugagggugaaauuaa

SEQ ID NO: 1283 - RNA, 23 nt, Artificial Sequence
  Description of Artificial Sequence: Synthetic oligonucleotide
gccagccuaagaucaugguuuag

SEQ ID NO: 1284 - RNA, 23 nt, Artificial Sequence
  Description of Artificial Sequence: Synthetic oligonucleotide
uaaagagguuucuaacccacccu

SEQ ID NO: 1285 - RNA, 23 nt, Artificial Sequence
  Description of Artificial Sequence: Synthetic oligonucleotide
gcugacucacuuuaucaauaguu

SEQ ID NO: 1286 - RNA, 23 nt, Artificial Sequence
  Description of Artificial Sequence: Synthetic oligonucleotide
cuuguaaagagguuucuaaccca

SEQ ID NO: 1287 - RNA, 23 nt, Artificial Sequence
  Description of Artificial Sequence: Synthetic oligonucleotide
aauugaaaaggcacgcuggcuug

SEQ ID NO: 1288 - RNA, 23 nt, Artificial Sequence
  Description of Artificial Sequence: Synthetic oligonucleotide
acuccauacugagggugaaauua

SEQ ID NO: 1289 - RNA, 23 nt, Artificial Sequence
  Description of Artificial Sequence: Synthetic oligonucleotide
gugaucaccugcgugucccaucu

SEQ ID NO: 1290 - RNA, 23 nt, Artificial Sequence
  Description of Artificial Sequence: Synthetic oligonucleotide
aaggcacgcuggcuugugaucuu

SEQ ID NO: 1291 - RNA, 23 nt, Artificial Sequence
  Description of Artificial Sequence: Synthetic oligonucleotide
aaaggcacgcuggcuugugaucu

SEQ ID NO: 1292 - RNA, 23 nt, Artificial Sequence
  Description of Artificial Sequence: Synthetic oligonucleotide
uuguaaagagguuucuaacccac

SEQ ID NO: 1293 - RNA, 21 nt, Artificial Sequence
  Description of Artificial Sequence: Synthetic oligonucleotide
agugugcaaauagucuacaaa

SEQ ID NO: 1294 - RNA, 21 nt, Artificial Sequence
  Description of Artificial Sequence: Synthetic oligonucleotide
acagaguccagucgaagauua

SEQ ID NO: 1295 - RNA, 21 nt, Artificial Sequence
  Description of Artificial Sequence: Synthetic oligonucleotide
gugugcaaauagucuacaaga

SEQ ID NO: 1296 - RNA, 21 nt, Artificial Sequence
  Description of Artificial Sequence: Synthetic oligonucleotide
gugcaaauagucuacaagcca

SEQ ID NO: 1297 - RNA, 21 nt, Artificial Sequence
  Description of Artificial Sequence: Synthetic oligonucleotide
ucaggugaaccaccaaaauca

SEQ ID NO: 1298 - RNA, 21 nt, Artificial Sequence
  Description of Artificial Sequence: Synthetic oligonucleotide
ugugcaaauagucuacaagca

SEQ ID NO: 1299 - RNA, 21 nt, Artificial Sequence
  Description of Artificial Sequence: Synthetic oligonucleotide
uuuaucaauaguuccauuuaa

SEQ ID NO: 1300 - RNA, 21 nt, Artificial Sequence
  Description of Artificial Sequence: Synthetic oligonucleotide
accagagugacuaugauagua

SEQ ID NO: 1301 - RNA, 21 nt, Artificial Sequence
  Description of Artificial Sequence: Synthetic oligonucleotide
uucacuuuaucaauaguucca

SEQ ID NO: 1302 - RNA, 21 nt, Artificial Sequence
  Description of Artificial Sequence: Synthetic oligonucleotide
ugugaauguccauauagugua

SEQ ID NO: 1303 - RNA, 21 nt, Artificial Sequence
  Description of Artificial Sequence: Synthetic oligonucleotide
gugaauguccauauaguguaa

SEQ ID NO: 1304 - RNA, 21 nt, Artificial Sequence
  Description of Artificial Sequence: Synthetic oligonucleotide
cgaugcuaagagcacuccaaa

SEQ ID NO: 1305 - RNA, 21 nt, Artificial Sequence
  Description of Artificial Sequence: Synthetic oligonucleotide
cugugaauguccauauaguga

SEQ ID NO: 1306 - RNA, 21 nt, Artificial Sequence
  Description of Artificial Sequence: Synthetic oligonucleotide
uggaaauaaaguuauuacuca

SEQ ID NO: 1307 - RNA, 21 nt, Artificial Sequence
  Description of Artificial Sequence: Synthetic oligonucleotide
ugggacuuuagggcuaaccaa

SEQ ID NO: 1308 - RNA, 21 nt, Artificial Sequence
  Description of Artificial Sequence: Synthetic oligonucleotide
aggcagugugcaaauagucua

SEQ ID NO: 1309 - RNA, 21 nt, Artificial Sequence
  Description of Artificial Sequence: Synthetic oligonucleotide
caggugaaccaccaaaaucca

SEQ ID NO: 1310 - RNA, 21 nt, Artificial Sequence
  Description of Artificial Sequence: Synthetic oligonucleotide
aaggugcagauaauuaauaaa

SEQ ID NO: 1311 - RNA, 21 nt, Artificial Sequence
  Description of Artificial Sequence: Synthetic oligonucleotide
aucccauuugagauugcuuga

SEQ ID NO: 1312 - RNA, 21 nt, Artificial Sequence
  Description of Artificial Sequence: Synthetic oligonucleotide
gcuggaucuuagcaacgucca

SEQ ID NO: 1313 - RNA, 21 nt, Artificial Sequence
  Description of Artificial Sequence: Synthetic oligonucleotide
cuucaaugauaagaguguaua

SEQ ID NO: 1314 - RNA, 21 nt, Artificial Sequence
  Description of Artificial Sequence: Synthetic oligonucleotide
uggcaaggugcagauaauuaa

SEQ ID NO: 1315 - RNA, 21 nt, Artificial Sequence
  Description of Artificial Sequence: Synthetic oligonucleotide
agggaacauccaucacaagca

SEQ ID NO: 1316 - RNA, 21 nt, Artificial Sequence
  Description of Artificial Sequence: Synthetic oligonucleotide
cauuuaaauugacuucaauga

SEQ ID NO: 1317 - RNA, 21 nt, Artificial Sequence
  Description of Artificial Sequence: Synthetic oligonucleotide
ucugucgauuaucaggcuuua

SEQ ID NO: 1318 - RNA, 21 nt, Artificial Sequence
  Description of Artificial Sequence: Synthetic oligonucleotide
cugguuccuccaagcucuuaa

SEQ ID NO: 1319 - RNA, 21 nt, Artificial Sequence
  Description of Artificial Sequence: Synthetic oligonucleotide
ccaaauugauuugugggcuaa

SEQ ID NO: 1320 - RNA, 21 nt, Artificial Sequence
  Description of Artificial Sequence: Synthetic oligonucleotide
auguuuugaaggguuucuuca

SEQ ID NO: 1321 - RNA, 21 nt, Artificial Sequence
  Description of Artificial Sequence: Synthetic oligonucleotide
cgccaggaguuugacacaaua

SEQ ID NO: 1322 - RNA, 21 nt, Artificial Sequence
  Description of Artificial Sequence: Synthetic oligonucleotide
agauaauuaauaagaagcuga

SEQ ID NO: 1323 - RNA, 21 nt, Artificial Sequence
  Description of Artificial Sequence: Synthetic oligonucleotide
ucaaugauaagaguguaucca

SEQ ID NO: 1324 - RNA, 21 nt, Artificial Sequence
  Description of Artificial Sequence: Synthetic oligonucleotide
augauaagaguguaucccaua

SEQ ID NO: 1325 - RNA, 21 nt, Artificial Sequence
  Description of Artificial Sequence: Synthetic oligonucleotide
gacaggacaggaaaugacgaa

SEQ ID NO: 1326 - RNA, 21 nt, Artificial Sequence
  Description of Artificial Sequence: Synthetic oligonucleotide
caccaaaauccggagaacgaa

SEQ ID NO: 1327 - RNA, 21 nt, Artificial Sequence
  Description of Artificial Sequence: Synthetic oligonucleotide
agacaggacaggaaaugacga

SEQ ID NO: 1328 - RNA, 21 nt, Artificial Sequence
  Description of Artificial Sequence: Synthetic oligonucleotide
agagcacuccaacugcugaaa

SEQ ID NO: 1329 - RNA, 21 nt, Artificial Sequence
  Description of Artificial Sequence: Synthetic oligonucleotide
aacugcugaagacgugacuga

SEQ ID NO: 1330 - RNA, 21 nt, Artificial Sequence
  Description of Artificial Sequence: Synthetic oligonucleotide
aagaguguaucccauuugaga

SEQ ID NO: 1331 - RNA, 21 nt, Artificial Sequence
  Description of Artificial Sequence: Synthetic oligonucleotide
uucaaugauaagaguguauca

SEQ ID NO: 1332 - RNA, 21 nt, Artificial Sequence
  Description of Artificial Sequence: Synthetic oligonucleotide
uugacuucaaugauaagagua

SEQ ID NO: 1333 - RNA, 21 nt, Artificial Sequence
  Description of Artificial Sequence: Synthetic oligonucleotide
gaguguaucccauuugagaua

SEQ ID NO: 1334 - RNA, 21 nt, Artificial Sequence
  Description of Artificial Sequence: Synthetic oligonucleotide
caaugauaagaguguauccca

SEQ ID NO: 1335 - RNA, 21 nt, Artificial Sequence
  Description of Artificial Sequence: Synthetic oligonucleotide
aucuguggcuuuaugagccua

SEQ ID NO: 1336 - RNA, 21 nt, Artificial Sequence
  Description of Artificial Sequence: Synthetic oligonucleotide
ugauaagaguguaucccauua

SEQ ID NO: 1337 - RNA, 21 nt, Artificial Sequence
  Description of Artificial Sequence: Synthetic oligonucleotide
gaucuguggcuuuaugagcca

SEQ ID NO: 1338 - RNA, 21 nt, Artificial Sequence
  Description of Artificial Sequence: Synthetic oligonucleotide
cuguggcuuuaugagccuuca

SEQ ID NO: 1339 - RNA, 21 nt, Artificial Sequence
  Description of Artificial Sequence: Synthetic oligonucleotide
aaugauaagaguguaucccaa

SEQ ID NO: 1340 - RNA, 21 nt, Artificial Sequence
  Description of Artificial Sequence: Synthetic oligonucleotide
caauaucugcucuacacuaga

SEQ ID NO: 1341 - RNA, 23 nt, Artificial Sequence
  Description of Artificial Sequence: Synthetic oligonucleotide
uuuguagacuauuugcacacugc

SEQ ID NO: 1342 - RNA, 23 nt, Artificial Sequence
  Description of Artificial Sequence: Synthetic oligonucleotide
uaaucuucgacuggacucugucc

SEQ ID NO: 1343 - RNA, 23 nt, Artificial Sequence
  Description of Artificial Sequence: Synthetic oligonucleotide
ucuuguagacuauuugcacacug

SEQ ID NO: 1344 - RNA, 23 nt, Artificial Sequence
  Description of Artificial Sequence: Synthetic oligonucleotide
uggcuuguagacuauuugcacac

SEQ ID NO: 1345 - RNA, 23 nt, Artificial Sequence
  Description of Artificial Sequence: Synthetic oligonucleotide
ugauuuuggugguucaccugacc

SEQ ID NO: 1346 - RNA, 23 nt, Artificial Sequence
  Description of Artificial Sequence: Synthetic oligonucleotide
ugcuuguagacuauuugcacacu

SEQ ID NO: 1347 - RNA, 23 nt, Artificial Sequence
  Description of Artificial Sequence: Synthetic oligonucleotide
uuaaauggaacuauugauaaagu

SEQ ID NO: 1348 - RNA, 23 nt, Artificial Sequence
  Description of Artificial Sequence: Synthetic oligonucleotide
uacuaucauagucacucugguga

SEQ ID NO: 1349 - RNA, 23 nt, Artificial Sequence
  Description of Artificial Sequence: Synthetic oligonucleotide
uggaacuauugauaaagugaauu

SEQ ID NO: 1350 - RNA, 23 nt, Artificial Sequence
  Description of Artificial Sequence: Synthetic oligonucleotide
uacacuauauggacauucacaga

SEQ ID NO: 1351 - RNA, 23 nt, Artificial Sequence
  Description of Artificial Sequence: Synthetic oligonucleotide
uuacacuauauggacauucacag

SEQ ID NO: 1352 - RNA, 23 nt, Artificial Sequence
  Description of Artificial Sequence: Synthetic oligonucleotide
uuuggagugcucuuagcaucgga

SEQ ID NO: 1353 - RNA, 23 nt, Artificial Sequence
  Description of Artificial Sequence: Synthetic oligonucleotide
ucacuauauggacauucacagac

SEQ ID NO: 1354 - RNA, 23 nt, Artificial Sequence
  Description of Artificial Sequence: Synthetic oligonucleotide
ugaguaauaacuuuauuuccaaa

SEQ ID NO: 1355 - RNA, 23 nt, Artificial Sequence
  Description of Artificial Sequence: Synthetic oligonucleotide
uugguuagcccuaaagucccagg

SEQ ID NO: 1356 - RNA, 23 nt, Artificial Sequence
  Description of Artificial Sequence: Synthetic oligonucleotide
uagacuauuugcacacugccucc

SEQ ID NO: 1357 - RNA, 23 nt, Artificial Sequence
  Description of Artificial Sequence: Synthetic oligonucleotide
uggauuuuggugguucaccugac

SEQ ID NO: 1358 - RNA, 23 nt, Artificial Sequence
  Description of Artificial Sequence: Synthetic oligonucleotide
uuuauuaauuaucugcaccuugc

SEQ ID NO: 1359 - RNA, 23 nt, Artificial Sequence
  Description of Artificial Sequence: Synthetic oligonucleotide
ucaagcaaucucaaaugggauac

SEQ ID NO: 1360 - RNA, 23 nt, Artificial Sequence
  Description of Artificial Sequence: Synthetic oligonucleotide
uggacguugcuaagauccagcuu

SEQ ID NO: 1361 - RNA, 23 nt, Artificial Sequence
  Description of Artificial Sequence: Synthetic oligonucleotide
uauacacucuuaucauugaaguc

SEQ ID NO: 1362 - RNA, 23 nt, Artificial Sequence
  Description of Artificial Sequence: Synthetic oligonucleotide
uuaauuaucugcaccuugccacc

SEQ ID NO: 1363 - RNA, 23 nt, Artificial Sequence
  Description of Artificial Sequence: Synthetic oligonucleotide
ugcuugugauggauguucccuaa

SEQ ID NO: 1364 - RNA, 23 nt, Artificial Sequence
  Description of Artificial Sequence: Synthetic oligonucleotide
ucauugaagucaauuuaaaugga

SEQ ID NO: 1365 - RNA, 23 nt, Artificial Sequence
  Description of Artificial Sequence: Synthetic oligonucleotide
uaaagccugauaaucgacagaag

SEQ ID NO: 1366 - RNA, 23 nt, Artificial Sequence
  Description of Artificial Sequence: Synthetic oligonucleotide
uuaagagcuuggaggaaccaggc

SEQ ID NO: 1367 - RNA, 23 nt, Artificial Sequence
  Description of Artificial Sequence: Synthetic oligonucleotide
uuagcccacaaaucaauuuggaa

SEQ ID NO: 1368 - RNA, 23 nt, Artificial Sequence
  Description of Artificial Sequence: Synthetic oligonucleotide
ugaagaaacccuucaaaacaugg

SEQ ID NO: 1369 - RNA, 23 nt, Artificial Sequence
  Description of Artificial Sequence: Synthetic oligonucleotide
uauugugucaaacuccuggcgag

SEQ ID NO: 1370 - RNA, 23 nt, Artificial Sequence
  Description of Artificial Sequence: Synthetic oligonucleotide
ucagcuucuuauuaauuaucugc

SEQ ID NO: 1371 - RNA, 23 nt, Artificial Sequence
  Description of Artificial Sequence: Synthetic oligonucleotide
uggauacacucuuaucauugaag

SEQ ID NO: 1372 - RNA, 23 nt, Artificial Sequence
  Description of Artificial Sequence: Synthetic oligonucleotide
uaugggauacacucuuaucauug

SEQ ID NO: 1373 - RNA, 23 nt, Artificial Sequence
  Description of Artificial Sequence: Synthetic oligonucleotide
uucgucauuuccuguccugucuu

SEQ ID NO: 1374 - RNA, 23 nt, Artificial Sequence
  Description of Artificial Sequence: Synthetic oligonucleotide
uucguucuccggauuuugguggu

SEQ ID NO: 1375 - RNA, 23 nt, Artificial Sequence
  Description of Artificial Sequence: Synthetic oligonucleotide
ucgucauuuccuguccugucuuu

SEQ ID NO: 1376 - RNA, 23 nt, Artificial Sequence
  Description of Artificial Sequence: Synthetic oligonucleotide
uuucagcaguuggagugcucuua

SEQ ID NO: 1377 - RNA, 23 nt, Artificial Sequence
  Description of Artificial Sequence: Synthetic oligonucleotide
ucagucacgucuucagcaguugg

SEQ ID NO: 1378 - RNA, 23 nt, Artificial Sequence
  Description of Artificial Sequence: Synthetic oligonucleotide
ucucaaaugggauacacucuuau

SEQ ID NO: 1379 - RNA, 23 nt, Artificial Sequence
  Description of Artificial Sequence: Synthetic oligonucleotide
ugauacacucuuaucauugaagu

SEQ ID NO: 1380 - RNA, 23 nt, Artificial Sequence
  Description of Artificial Sequence: Synthetic oligonucleotide
uacucuuaucauugaagucaauu

SEQ ID NO: 1381 - RNA, 23 nt, Artificial Sequence
  Description of Artificial Sequence: Synthetic oligonucleotide
uaucucaaaugggauacacucuu

SEQ ID NO: 1382 - RNA, 23 nt, Artificial Sequence
  Description of Artificial Sequence: Synthetic oligonucleotide
ugggauacacucuuaucauugaa

SEQ ID NO: 1383 - RNA, 23 nt, Artificial Sequence
  Description of Artificial Sequence: Synthetic oligonucleotide
uaggcucauaaagccacagaucu

SEQ ID NO: 1384 - RNA, 23 nt, Artificial Sequence
  Description of Artificial Sequence: Synthetic oligonucleotide
uaaugggauacacucuuaucauu

SEQ ID NO: 1385 - RNA, 23 nt, Artificial Sequence
  Description of Artificial Sequence: Synthetic oligonucleotide
uggcucauaaagccacagaucua

SEQ ID NO: 1386 - RNA, 23 nt, Artificial Sequence
  Description of Artificial Sequence: Synthetic oligonucleotide
ugaaggcucauaaagccacagau

SEQ ID NO: 1387 - RNA, 23 nt, Artificial Sequence
  Description of Artificial Sequence: Synthetic oligonucleotide
uugggauacacucuuaucauuga

SEQ ID NO: 1388 - RNA, 23 nt, Artificial Sequence
  Description of Artificial Sequence: Synthetic oligonucleotide
ucuaguguagagcagauauugcc

SEQ ID NO: 1389 - RNA, 21 nt, Artificial Sequence
  Description of Artificial Sequence: Synthetic oligonucleotide
agugugcaaauagucuacaaa

SEQ ID NO: 1390 - RNA, 21 nt, Artificial Sequence
  Description of Artificial Sequence: Synthetic oligonucleotide
acagaguccagucgaagauua

SEQ ID NO: 1391 - RNA, 21 nt, Artificial Sequence
  Description of Artificial Sequence: Synthetic oligonucleotide
gugugcaaauagucuacaaga

SEQ ID NO: 1392 - RNA, 21 nt, Artificial Sequence
  Description of Artificial Sequence: Synthetic oligonucleotide
gugcaaauagucuacaagcca

SEQ ID NO: 1393 - RNA, 21 nt, Artificial Sequence
  Description of Artificial Sequence: Synthetic oligonucleotide
ucaggugaaccaccaaaauca

SEQ ID NO: 1394 - RNA, 21 nt, Artificial Sequence
  Description of Artificial Sequence: Synthetic oligonucleotide
ugugcaaauagucuacaagca

SEQ ID NO: 1395 - RNA, 21 nt, Artificial Sequence
  Description of Artificial Sequence: Synthetic oligonucleotide
uuuaucaauaguuccauuuaa

SEQ ID NO: 1396 - RNA, 21 nt, Artificial Sequence
  Description of Artificial Sequence: Synthetic oligonucleotide
accagagugacuaugauagua

SEQ ID NO: 1397 - RNA, 21 nt, Artificial Sequence
  Description of Artificial Sequence: Synthetic oligonucleotide
uucacuuuaucaauaguucca

SEQ ID NO: 1398 - RNA, 21 nt, Artificial Sequence
  Description of Artificial Sequence: Synthetic oligonucleotide
ugugaauguccauauagugua

SEQ ID NO: 1399 - RNA, 21 nt, Artificial Sequence
  Description of Artificial Sequence: Synthetic oligonucleotide
gugaauguccauauaguguaa

SEQ ID NO: 1400 - RNA, 21 nt, Artificial Sequence
  Description of Artificial Sequence: Synthetic oligonucleotide
cgaugcuaagagcacuccaaa

SEQ ID NO: 1401 - RNA, 21 nt, Artificial Sequence
  Description of Artificial Sequence: Synthetic oligonucleotide
cugugaauguccauauaguga

SEQ ID NO: 1402 - RNA, 21 nt, Artificial Sequence
  Description of Artificial Sequence: Synthetic oligonucleotide
uggaaauaaaguuauuacuca

SEQ ID NO: 1403 - RNA, 21 nt, Artificial Sequence
  Description of Artificial Sequence: Synthetic oligonucleotide
ugggacuuuagggcuaaccaa

SEQ ID NO: 1404 - RNA, 21 nt, Artificial Sequence
  Description of Artificial Sequence: Synthetic oligonucleotide
aggcagugugcaaauagucua

SEQ ID NO: 1405 - RNA, 21 nt, Artificial Sequence
  Description of Artificial Sequence: Synthetic oligonucleotide
caggugaaccaccaaaaucca

SEQ ID NO: 1406 - RNA, 21 nt, Artificial Sequence
  Description of Artificial Sequence: Synthetic oligonucleotide
aaggugcagauaauuaauaaa

SEQ ID NO: 1407 - RNA, 21 nt, Artificial Sequence
  Description of Artificial Sequence: Synthetic oligonucleotide
aucccauuugagauugcuuga

SEQ ID NO: 1408 - RNA, 21 nt, Artificial Sequence
  Description of Artificial Sequence: Synthetic oligonucleotide
gcuggaucuuagcaacgucca

SEQ ID NO: 1409 - RNA, 21 nt, Artificial Sequence
  Description of Artificial Sequence: Synthetic oligonucleotide
cuucaaugauaagaguguaua

SEQ ID NO: 1410 - RNA, 21 nt, Artificial Sequence
  Description of Artificial Sequence: Synthetic oligonucleotide
uggcaaggugcagauaauuaa

SEQ ID NO: 1411 - RNA, 21 nt, Artificial Sequence
  Description of Artificial Sequence: Synthetic oligonucleotide
agggaacauccaucacaagca

SEQ ID NO: 1412 - RNA, 21 nt, Artificial Sequence
  Description of Artificial Sequence: Synthetic oligonucleotide
cauuuaaauugacuucaauga

SEQ ID NO: 1413 - RNA, 21 nt, Artificial Sequence
  Description of Artificial Sequence: Synthetic oligonucleotide
ucugucgauuaucaggcuuua

SEQ ID NO: 1414 - RNA, 21 nt, Artificial Sequence
  Description of Artificial Sequence: Synthetic oligonucleotide
cugguuccuccaagcucuuaa

SEQ ID NO: 1415 - RNA, 21 nt, Artificial Sequence
  Description of Artificial Sequence: Synthetic oligonucleotide
ccaaauugauuugugggcuaa

SEQ ID NO: 1416 - RNA, 21 nt, Artificial Sequence
  Description of Artificial Sequence: Synthetic oligonucleotide
auguuuugaaggguuucuuca

SEQ ID NO: 1417 - RNA, 21 nt, Artificial Sequence
  Description of Artificial Sequence: Synthetic oligonucleotide
cgccaggaguuugacacaaua

SEQ ID NO: 1418 - RNA, 21 nt, Artificial Sequence
  Description of Artificial Sequence: Synthetic oligonucleotide
agauaauuaauaagaagcuga

SEQ ID NO: 1419 - RNA, 21 nt, Artificial Sequence
  Description of Artificial Sequence: Synthetic oligonucleotide
ucaaugauaagaguguaucca

SEQ ID NO: 1420 - RNA, 21 nt, Artificial Sequence
  Description of Artificial Sequence: Synthetic oligonucleotide
augauaagaguguaucccaua

SEQ ID NO: 1421 - RNA, 21 nt, Artificial Sequence
  Description of Artificial Sequence: Synthetic oligonucleotide
gacaggacaggaaaugacgaa

SEQ ID NO: 1422 - RNA, 21 nt, Artificial Sequence
  Description of Artificial Sequence: Synthetic oligonucleotide
caccaaaauccggagaacgaa

SEQ ID NO: 1423 - RNA, 21 nt, Artificial Sequence
  Description of Artificial Sequence: Synthetic oligonucleotide
agacaggacaggaaaugacga

SEQ ID NO: 1424 - RNA, 21 nt, Artificial Sequence
  Description of Artificial Sequence: Synthetic oligonucleotide
agagcacuccaacugcugaaa

SEQ ID NO: 1425 - RNA, 21 nt, Artificial Sequence
  Description of Artificial Sequence: Synthetic oligonucleotide
aacugcugaagacgugacuga

SEQ ID NO: 1426 - RNA, 21 nt, Artificial Sequence
  Description of Artificial Sequence: Synthetic oligonucleotide
aagaguguaucccauuugaga

SEQ ID NO: 1427 - RNA, 21 nt, Artificial Sequence
  Description of Artificial Sequence: Synthetic oligonucleotide
uucaaugauaagaguguauca

SEQ ID NO: 1428 - RNA, 21 nt, Artificial Sequence
  Description of Artificial Sequence: Synthetic oligonucleotide
uugacuucaaugauaagagua

SEQ ID NO: 1429 - RNA, 21 nt, Artificial Sequence
  Description of Artificial Sequence: Synthetic oligonucleotide
gaguguaucccauuugagaua

SEQ ID NO: 1430 - RNA, 21 nt, Artificial Sequence
  Description of Artificial Sequence: Synthetic oligonucleotide
caaugauaagaguguauccca

SEQ ID NO: 1431 - RNA, 21 nt, Artificial Sequence
  Description of Artificial Sequence: Synthetic oligonucleotide
aucuguggcuuuaugagccua

SEQ ID NO: 1432 - RNA, 21 nt, Artificial Sequence
  Description of Artificial Sequence: Synthetic oligonucleotide
ugauaagaguguaucccauua

SEQ ID NO: 1433 - RNA, 21 nt, Artificial Sequence
  Description of Artificial Sequence: Synthetic oligonucleotide
gaucuguggcuuuaugagcca

SEQ ID NO: 1434 - RNA, 21 nt, Artificial Sequence
  Description of Artificial Sequence: Synthetic oligonucleotide
cuguggcuuuaugagccuuca

SEQ ID NO: 1435 - RNA, 21 nt, Artificial Sequence
  Description of Artificial Sequence: Synthetic oligonucleotide
aaugauaagaguguaucccaa

SEQ ID NO: 1436 - RNA, 21 nt, Artificial Sequence
  Description of Artificial Sequence: Synthetic oligonucleotide
caauaucugcucuacacuaga

SEQ ID NO: 1437 - RNA, 23 nt, Artificial Sequence
  Description of Artificial Sequence: Synthetic oligonucleotide
uuuguagacuauuugcacacugc

SEQ ID NO: 1438 - RNA, 23 nt, Artificial Sequence
  Description of Artificial Sequence: Synthetic oligonucleotide
uaaucuucgacuggacucugucc

SEQ ID NO: 1439 - RNA, 23 nt, Artificial Sequence
  Description of Artificial Sequence: Synthetic oligonucleotide
ucuuguagacuauuugcacacug

SEQ ID NO: 1440 - RNA, 23 nt, Artificial Sequence
  Description of Artificial Sequence: Synthetic oligonucleotide
uggcuuguagacuauuugcacac

SEQ ID NO: 1441 - RNA, 23 nt, Artificial Sequence
  Description of Artificial Sequence: Synthetic oligonucleotide
ugauuuuggugguucaccugacc

SEQ ID NO: 1442 - RNA, 23 nt, Artificial Sequence
  Description of Artificial Sequence: Synthetic oligonucleotide
ugcuuguagacuauuugcacacu

SEQ ID NO: 1443 - RNA, 23 nt, Artificial Sequence
  Description of Artificial Sequence: Synthetic oligonucleotide
uuaaauggaacuauugauaaagu

SEQ ID NO: 1444 - RNA, 23 nt, Artificial Sequence
  Description of Artificial Sequence: Synthetic oligonucleotide
uacuaucauagucacucugguga

SEQ ID NO: 1445 - RNA, 23 nt, Artificial Sequence
  Description of Artificial Sequence: Synthetic oligonucleotide
uggaacuauugauaaagugaauu

SEQ ID NO: 1446 - RNA, 23 nt, Artificial Sequence
  Description of Artificial Sequence: Synthetic oligonucleotide
uacacuauauggacauucacaga

SEQ ID NO: 1447 - RNA, 23 nt, Artificial Sequence
  Description of Artificial Sequence: Synthetic oligonucleotide
uuacacuauauggacauucacag

SEQ ID NO: 1448 - RNA, 23 nt, Artificial Sequence
  Description of Artificial Sequence: Synthetic oligonucleotide
uuuggagugcucuuagcaucgga

SEQ ID NO: 1449 - RNA, 23 nt, Artificial Sequence
  Description of Artificial Sequence: Synthetic oligonucleotide
ucacuauauggacauucacagac

SEQ ID NO: 1450 - RNA, 23 nt, Artificial Sequence
  Description of Artificial Sequence: Synthetic oligonucleotide
ugaguaauaacuuuauuuccaaa

SEQ ID NO: 1451 - RNA, 23 nt, Artificial Sequence
  Description of Artificial Sequence: Synthetic oligonucleotide
uugguuagcccuaaagucccagg

SEQ ID NO: 1452 - RNA, 23 nt, Artificial Sequence
  Description of Artificial Sequence: Synthetic oligonucleotide
uagacuauuugcacacugccucc

SEQ ID NO: 1453 - RNA, 23 nt, Artificial Sequence
  Description of Artificial Sequence: Synthetic oligonucleotide
uggauuuuggugguucaccugac

SEQ ID NO: 1454 - RNA, 23 nt, Artificial Sequence
  Description of Artificial Sequence: Synthetic oligonucleotide
uuuauuaauuaucugcaccuugc

SEQ ID NO: 1455 - RNA, 23 nt, Artificial Sequence
  Description of Artificial Sequence: Synthetic oligonucleotide
ucaagcaaucucaaaugggauac

SEQ ID NO: 1456 - RNA, 23 nt, Artificial Sequence
  Description of Artificial Sequence: Synthetic oligonucleotide
uggacguugcuaagauccagcuu

SEQ ID NO: 1457 - RNA, 23 nt, Artificial Sequence
  Description of Artificial Sequence: Synthetic oligonucleotide
uauacacucuuaucauugaaguc

SEQ ID NO: 1458 - RNA, 23 nt, Artificial Sequence
  Description of Artificial Sequence: Synthetic oligonucleotide
uuaauuaucugcaccuugccacc

SEQ ID NO: 1459 - RNA, 23 nt, Artificial Sequence
  Description of Artificial Sequence: Synthetic oligonucleotide
ugcuugugauggauguucccuaa

SEQ ID NO: 1460 - RNA, 23 nt, Artificial Sequence
  Description of Artificial Sequence: Synthetic oligonucleotide
ucauugaagucaauuuaaaugga

SEQ ID NO: 1461 - RNA, 23 nt, Artificial Sequence
  Description of Artificial Sequence: Synthetic oligonucleotide
uaaagccugauaaucgacagaag

SEQ ID NO: 1462 - RNA, 23 nt, Artificial Sequence
  Description of Artificial Sequence: Synthetic oligonucleotide
uuaagagcuuggaggaaccaggc

SEQ ID NO: 1463 - RNA, 23 nt, Artificial Sequence
  Description of Artificial Sequence: Synthetic oligonucleotide
uuagcccacaaaucaauuuggaa

SEQ ID NO: 1464 - RNA, 23 nt, Artificial Sequence
  Description of Artificial Sequence: Synthetic oligonucleotide
ugaagaaacccuucaaaacaugg

SEQ ID NO: 1465 - RNA, 23 nt, Artificial Sequence
  Description of Artificial Sequence: Synthetic oligonucleotide
uauugugucaaacuccuggcgag

SEQ ID NO: 1466 - RNA, 23 nt, Artificial Sequence
  Description of Artificial Sequence: Synthetic oligonucleotide
ucagcuucuuauuaauuaucugc

SEQ ID NO: 1467 - RNA, 23 nt, Artificial Sequence
  Description of Artificial Sequence: Synthetic oligonucleotide
uggauacacucuuaucauugaag

SEQ ID NO: 1468 - RNA, 23 nt, Artificial Sequence
  Description of Artificial Sequence: Synthetic oligonucleotide
uaugggauacacucuuaucauug

SEQ ID NO: 1469 - RNA, 23 nt, Artificial Sequence
  Description of Artificial Sequence: Synthetic oligonucleotide
uucgucauuuccuguccugucuu

SEQ ID NO: 1470 - RNA, 23 nt, Artificial Sequence
  Description of Artificial Sequence: Synthetic oligonucleotide
uucguucuccggauuuugguggu

SEQ ID NO: 1471 - RNA, 23 nt, Artificial Sequence
  Description of Artificial Sequence: Synthetic oligonucleotide
ucgucauuuccuguccugucuuu

SEQ ID NO: 1472 - RNA, 23 nt, Artificial Sequence
  Description of Artificial Sequence: Synthetic oligonucleotide
uuucagcaguuggagugcucuua

SEQ ID NO: 1473 - RNA, 23 nt, Artificial Sequence
  Description of Artificial Sequence: Synthetic oligonucleotide
ucagucacgucuucagcaguugg

SEQ ID NO: 1474 - RNA, 23 nt, Artificial Sequence
  Description of Artificial Sequence: Synthetic oligonucleotide
ucucaaaugggauacacucuuau

SEQ ID NO: 1475 - RNA, 23 nt, Artificial Sequence
  Description of Artificial Sequence: Synthetic oligonucleotide
ugauacacucuuaucauugaagu

SEQ ID NO: 1476 - RNA, 23 nt, Artificial Sequence
  Description of Artificial Sequence: Synthetic oligonucleotide
uacucuuaucauugaagucaauu

SEQ ID NO: 1477 - RNA, 23 nt, Artificial Sequence
  Description of Artificial Sequence: Synthetic oligonucleotide
uaucucaaaugggauacacucuu

SEQ ID NO: 1478 - RNA, 23 nt, Artificial Sequence
  Description of Artificial Sequence: Synthetic oligonucleotide
ugggauacacucuuaucauugaa

SEQ ID NO: 1479 - RNA, 23 nt, Artificial Sequence
  Description of Artificial Sequence: Synthetic oligonucleotide
uaggcucauaaagccacagaucu

SEQ ID NO: 1480 - RNA, 23 nt, Artificial Sequence
  Description of Artificial Sequence: Synthetic oligonucleotide
uaaugggauacacucuuaucauu

SEQ ID NO: 1481 - RNA, 23 nt, Artificial Sequence
  Description of Artificial Sequence: Synthetic oligonucleotide
uggcucauaaagccacagaucua

SEQ ID NO: 1482 - RNA, 23 nt, Artificial Sequence
  Description of Artificial Sequence: Synthetic oligonucleotide
ugaaggcucauaaagccacagau

SEQ ID NO: 1483 - RNA, 23 nt, Artificial Sequence
  Description of Artificial Sequence: Synthetic oligonucleotide
uugggauacacucuuaucauuga

SEQ ID NO: 1484 - RNA, 23 nt, Artificial Sequence
  Description of Artificial Sequence: Synthetic oligonucleotide
ucuaguguagagcagauauugcc

SEQ ID NO: 1485 - RNA, 23 nt, Artificial Sequence
  Description of Artificial Sequence: Synthetic oligonucleotide
gcagugugcaaauagucuacaag

SEQ ID NO: 1486 - RNA, 23 nt, Artificial Sequence
  Description of Artificial Sequence: Synthetic oligonucleotide
ggacagaguccagucgaagauug

SEQ ID NO: 1487 - RNA, 23 nt, Artificial Sequence
  Description of Artificial Sequence: Synthetic oligonucleotide
cagugugcaaauagucuacaagc

SEQ ID NO: 1488 - RNA, 23 nt, Artificial Sequence
  Description of Artificial Sequence: Synthetic oligonucleotide
gugugcaaauagucuacaagccg

SEQ ID NO: 1489 - RNA, 23 nt, Artificial Sequence
  Description of Artificial Sequence: Synthetic oligonucleotide
ggucaggugaaccaccaaaaucc

SEQ ID NO: 1490 - RNA, 23 nt, Artificial Sequence
  Description of Artificial Sequence: Synthetic oligonucleotide
agugugcaaauagucuacaagcc

SEQ ID NO: 1491 - RNA, 23 nt, Artificial Sequence
  Description of Artificial Sequence: Synthetic oligonucleotide
acuuuaucaauaguuccauuuaa

SEQ ID NO: 1492 - RNA, 23 nt, Artificial Sequence
  Description of Artificial Sequence: Synthetic oligonucleotide
ucaccagagugacuaugauagug

SEQ ID NO: 1493 - RNA, 23 nt, Artificial Sequence
  Description of Artificial Sequence: Synthetic oligonucleotide
aauucacuuuaucaauaguucca

SEQ ID NO: 1494 - RNA, 23 nt, Artificial Sequence
  Description of Artificial Sequence: Synthetic oligonucleotide
ucugugaauguccauauagugua

SEQ ID NO: 1495 - RNA, 23 nt, Artificial Sequence
  Description of Artificial Sequence: Synthetic oligonucleotide
cugugaauguccauauaguguau

SEQ ID NO: 1496 - RNA, 23 nt, Artificial Sequence
  Description of Artificial Sequence: Synthetic oligonucleotide
uccgaugcuaagagcacuccaac

SEQ ID NO: 1497 - RNA, 23 nt, Artificial Sequence
  Description of Artificial Sequence: Synthetic oligonucleotide
gucugugaauguccauauagugu

SEQ ID NO: 1498 - RNA, 23 nt, Artificial Sequence
  Description of Artificial Sequence: Synthetic oligonucleotide
uuuggaaauaaaguuauuacucu

SEQ ID NO: 1499 - RNA, 23 nt, Artificial Sequence
  Description of Artificial Sequence: Synthetic oligonucleotide
ccugggacuuuagggcuaaccag

SEQ ID NO: 1500 - RNA, 23 nt, Artificial Sequence
  Description of Artificial Sequence: Synthetic oligonucleotide
ggaggcagugugcaaauagucua

SEQ ID NO: 1501 - RNA, 23 nt, Artificial Sequence
  Description of Artificial Sequence: Synthetic oligonucleotide
gucaggugaaccaccaaaauccg

SEQ ID NO: 1502 - RNA, 23 nt, Artificial Sequence
  Description of Artificial Sequence: Synthetic oligonucleotide
gcaaggugcagauaauuaauaag

SEQ ID NO: 1503 - RNA, 23 nt, Artificial Sequence
  Description of Artificial Sequence: Synthetic oligonucleotide
guaucccauuugagauugcuugc

SEQ ID NO: 1504 - RNA, 23 nt, Artificial Sequence
  Description of Artificial Sequence: Synthetic oligonucleotide
aagcuggaucuuagcaacgucca

SEQ ID NO: 1505 - RNA, 23 nt, Artificial Sequence
  Description of Artificial Sequence: Synthetic oligonucleotide
gacuucaaugauaagaguguauc

SEQ ID NO: 1506 - RNA, 23 nt, Artificial Sequence
  Description of Artificial Sequence: Synthetic oligonucleotide
gguggcaaggugcagauaauuaa

SEQ ID NO: 1507 - RNA, 23 nt, Artificial Sequence
  Description of Artificial Sequence: Synthetic oligonucleotide
uuagggaacauccaucacaagcc

SEQ ID NO: 1508 - RNA, 23 nt, Artificial Sequence
  Description of Artificial Sequence: Synthetic oligonucleotide
uccauuuaaauugacuucaauga

SEQ ID NO: 1509 - RNA, 23 nt, Artificial Sequence
  Description of Artificial Sequence: Synthetic oligonucleotide
cuucugucgauuaucaggcuuug

SEQ ID NO: 1510 - RNA, 23 nt, Artificial Sequence
  Description of Artificial Sequence: Synthetic oligonucleotide
gccugguuccuccaagcucuuaa

SEQ ID NO: 1511 - RNA, 23 nt, Artificial Sequence
  Description of Artificial Sequence: Synthetic oligonucleotide
uuccaaauugauuugugggcuaa

SEQ ID NO: 1512 - RNA, 23 nt, Artificial Sequence
  Description of Artificial Sequence: Synthetic oligonucleotide
ccauguuuugaaggguuucuucu

SEQ ID NO: 1513 - RNA, 23 nt, Artificial Sequence
  Description of Artificial Sequence: Synthetic oligonucleotide
cucgccaggaguuugacacaaug

SEQ ID NO: 1514 - RNA, 23 nt, Artificial Sequence
  Description of Artificial Sequence: Synthetic oligonucleotide
gcagauaauuaauaagaagcugg

SEQ ID NO: 1515 - RNA, 23 nt, Artificial Sequence
  Description of Artificial Sequence: Synthetic oligonucleotide
cuucaaugauaagaguguauccc

SEQ ID NO: 1516 - RNA, 23 nt, Artificial Sequence
  Description of Artificial Sequence: Synthetic oligonucleotide
caaugauaagaguguaucccauu

SEQ ID NO: 1517 - RNA, 23 nt, Artificial Sequence
  Description of Artificial Sequence: Synthetic oligonucleotide
aagacaggacaggaaaugacgag

SEQ ID NO: 1518 - RNA, 23 nt, Artificial Sequence
  Description of Artificial Sequence: Synthetic oligonucleotide
accaccaaaauccggagaacgaa

SEQ ID NO: 1519 - RNA, 23 nt, Artificial Sequence
  Description of Artificial Sequence: Synthetic oligonucleotide
aaagacaggacaggaaaugacga

SEQ ID NO: 1520 - RNA, 23 nt, Artificial Sequence
  Description of Artificial Sequence: Synthetic oligonucleotide
uaagagcacuccaacugcugaag

SEQ ID NO: 1521 - RNA, 23 nt, Artificial Sequence
  Description of Artificial Sequence: Synthetic oligonucleotide
ccaacugcugaagacgugacugc

SEQ ID NO: 1522 - RNA, 23 nt, Artificial Sequence
  Description of Artificial Sequence: Synthetic oligonucleotide
auaagaguguaucccauuugaga

SEQ ID NO: 1523 - RNA, 23 nt, Artificial Sequence
  Description of Artificial Sequence: Synthetic oligonucleotide
acuucaaugauaagaguguaucc

SEQ ID NO: 1524 - RNA, 23 nt, Artificial Sequence
  Description of Artificial Sequence: Synthetic oligonucleotide
aauugacuucaaugauaagagug

SEQ ID NO: 1525 - RNA, 23 nt, Artificial Sequence
  Description of Artificial Sequence: Synthetic oligonucleotide
aagaguguaucccauuugagauu

SEQ ID NO: 1526 - RNA, 23 nt, Artificial Sequence
  Description of Artificial Sequence: Synthetic oligonucleotide
uucaaugauaagaguguauccca

SEQ ID NO: 1527 - RNA, 23 nt, Artificial Sequence
  Description of Artificial Sequence: Synthetic oligonucleotide
agaucuguggcuuuaugagccuu

SEQ ID NO: 1528 - RNA, 23 nt, Artificial Sequence
  Description of Artificial Sequence: Synthetic oligonucleotide
aaugauaagaguguaucccauuu

SEQ ID NO: 1529 - RNA, 23 nt, Artificial Sequence
  Description of Artificial Sequence: Synthetic oligonucleotide
uagaucuguggcuuuaugagccu

SEQ ID NO: 1530 - RNA, 23 nt, Artificial Sequence
  Description of Artificial Sequence: Synthetic oligonucleotide
aucuguggcuuuaugagccuuca

SEQ ID NO: 1531 - RNA, 23 nt, Artificial Sequence
  Description of Artificial Sequence: Synthetic oligonucleotide
ucaaugauaagaguguaucccau

SEQ ID NO: 1532 - RNA, 23 nt, Artificial Sequence
  Description of Artificial Sequence: Synthetic oligonucleotide
ggcaauaucugcucuacacuagg

SEQ ID NO: 1533 - DNA, 82 bp, Homo sapiens
gtgcaaatagtctacaaaccagttgacctgagcaaggtgacctccaagtgtggctcattaggcaacatccatcataaaccag

SEQ ID NO: 1534 - protein, 16 aa, Unknown
  Description of Unknown: RFGF sequence
AAVALLPAVLLALLAP

SEQ ID NO: 1535 - protein, 11 aa, Unknown
  Description of Unknown: RFGF analogue sequence
AALLPVLLAAP

SEQ ID NO: 1536 - protein, 13 aa, Human immunodeficiency virus
GRKKRRQRRRPPQ

SEQ ID NO: 1537 - protein, 16 aa, Drosophila sp.
RQIKIWFQNRRMKWKK

SEQ ID NO: 1538 - RNA, 21 nt, Artificial Sequence
  Description of Artificial Sequence: Synthetic oligonucleotide
acgugacccaagcucgcauga

SEQ ID NO: 1539 - RNA, 21 nt, Artificial Sequence
  Description of Artificial Sequence: Synthetic oligonucleotide
cgugacccaagcucgcaugga

SEQ ID NO: 1540 - RNA, 21 nt, Artificial Sequence
  Description of Artificial Sequence: Synthetic oligonucleotide
gugacccaagcucgcauggua

SEQ ID NO: 1541 - RNA, 21 nt, Artificial Sequence
  Description of Artificial Sequence: Synthetic oligonucleotide
ugacccaagcucgcaugguca

SEQ ID NO: 1542 - RNA, 21 nt, Artificial Sequence
  Description of Artificial Sequence: Synthetic oligonucleotide
gacccaagcucgcauggucaa

SEQ ID NO: 1543 - RNA, 21 nt, Artificial Sequence
  Description of Artificial Sequence: Synthetic oligonucleotide
acccaagcucgcauggucaga

SEQ ID NO: 1544 - RNA, 21 nt, Artificial Sequence
  Description of Artificial Sequence: Synthetic oligonucleotide
cccaagcucgcauggucagua

SEQ ID NO: 1545 - RNA, 21 nt, Artificial Sequence
  Description of Artificial Sequence: Synthetic oligonucleotide
ccaagcucgcauggucaguaa

SEQ ID NO: 1546 - RNA, 21 nt, Artificial Sequence
  Description of Artificial Sequence: Synthetic oligonucleotide
caagcucgcauggucaguaaa

SEQ ID NO: 1547 - RNA, 21 nt, Artificial Sequence
  Description of Artificial Sequence: Synthetic oligonucleotide
agugugcaaauagucuacaaa

SEQ ID NO: 1548 - RNA, 21 nt, Artificial Sequence
  Description of Artificial Sequence: Synthetic oligonucleotide
ugcaaauagucuacaaaccaa

SEQ ID NO: 1549 - RNA, 21 nt, Artificial Sequence
  Description of Artificial Sequence: Synthetic oligonucleotide
auagucuacaaaccaguugaa

SEQ ID NO: 1550 - RNA, 21 nt, Artificial Sequence
  Description of Artificial Sequence: Synthetic oligonucleotide
agucuacaaaccaguugacca

SEQ ID NO: 1551 - RNA, 21 nt, Artificial Sequence
  Description of Artificial Sequence: Synthetic oligonucleotide
gucuacaaaccaguugaccua

SEQ ID NO: 1552 - RNA, 21 nt, Artificial Sequence
  Description of Artificial Sequence: Synthetic oligonucleotide
aggcaacauccaucauaaaca

SEQ ID NO: 1553 - RNA, 21 nt, Artificial Sequence
  Description of Artificial Sequence: Synthetic oligonucleotide
ggcaacauccaucauaaacca

SEQ ID NO: 1554 - RNA, 21 nt, Artificial Sequence
  Description of Artificial Sequence: Synthetic oligonucleotide
gcaacauccaucauaaaccaa

SEQ ID NO: 1555 - RNA, 21 nt, Artificial Sequence
  Description of Artificial Sequence: Synthetic oligonucleotide
aacauccaucauaaaccagga

SEQ ID NO: 1556 - RNA, 21 nt, Artificial Sequence
  Description of Artificial Sequence: Synthetic oligonucleotide
aucugagaagcuugacuucaa

SEQ ID NO: 1557 - RNA, 21 nt, Artificial Sequence
  Description of Artificial Sequence: Synthetic oligonucleotide
cagcaucgacaugguagacua

SEQ ID NO: 1558 - RNA, 21 nt, Artificial Sequence
  Description of Artificial Sequence: Synthetic oligonucleotide
uggcagcaacaaaggauuuga

SEQ ID NO: 1559 - RNA, 21 nt, Artificial Sequence
  Description of Artificial Sequence: Synthetic oligonucleotide
ggcagcaacaaaggauuugaa

SEQ ID NO: 1560 - RNA, 21 nt, Artificial Sequence
  Description of Artificial Sequence: Synthetic oligonucleotide
agcaacaaaggauuugaaaca

SEQ ID NO: 1561 - RNA, 21 nt, Artificial Sequence
  Description of Artificial Sequence: Synthetic oligonucleotide
caacaaaggauuugaaacuua

SEQ ID NO: 1562 - RNA, 21 nt, Artificial Sequence
  Description of Artificial Sequence: Synthetic oligonucleotide
aacaaaggauuugaaacuuga

SEQ ID NO: 1563 - RNA, 21 nt, Artificial Sequence
  Description of Artificial Sequence: Synthetic oligonucleotide
acaaaggauuugaaacuugga

SEQ ID NO: 1564 - RNA, 21 nt, Artificial Sequence
  Description of Artificial Sequence: Synthetic oligonucleotide
caaaggauuugaaacuuggua

SEQ ID NO: 1565 - RNA, 21 nt, Artificial Sequence
  Description of Artificial Sequence: Synthetic oligonucleotide
aaaggauuugaaacuugguga

SEQ ID NO: 1566 - RNA, 21 nt, Artificial Sequence
  Description of Artificial Sequence: Synthetic oligonucleotide
aaggauuugaaacuuggugua

SEQ ID NO: 1567 - RNA, 21 nt, Artificial Sequence
  Description of Artificial Sequence: Synthetic oligonucleotide
gauuugaaacuugguguguua

SEQ ID NO: 1568 - RNA, 21 nt, Artificial Sequence
  Description of Artificial Sequence: Synthetic oligonucleotide
ggcagacgaugucaaccuuga

SEQ ID NO: 1569 - RNA, 21 nt, Artificial Sequence
  Description of Artificial Sequence: Synthetic oligonucleotide
agacgaugucaaccuugugua

SEQ ID NO: 1570 - RNA, 21 nt, Artificial Sequence
  Description of Artificial Sequence: Synthetic oligonucleotide
gaugucaaccuugugugagua

SEQ ID NO: 1571 - RNA, 21 nt, Artificial Sequence
  Description of Artificial Sequence: Synthetic oligonucleotide
gcuccacagaaacccuguuua

SEQ ID NO: 1572 - RNA, 21 nt, Artificial Sequence
  Description of Artificial Sequence: Synthetic oligonucleotide
uugaguucugaagguuggaaa

SEQ ID NO: 1573 - RNA, 21 nt, Artificial Sequence
  Description of Artificial Sequence: Synthetic oligonucleotide
ugaguucugaagguuggaaca

SEQ ID NO: 1574 - RNA, 21 nt, Artificial Sequence
  Description of Artificial Sequence: Synthetic oligonucleotide
uagggcuaaccaguucucuua

SEQ ID NO: 1575 - RNA, 21 nt, Artificial Sequence
  Description of Artificial Sequence: Synthetic oligonucleotide
gggcuaaccaguucucuuuga

SEQ ID NO: 1576 - RNA, 21 nt, Artificial Sequence
  Description of Artificial Sequence: Synthetic oligonucleotide
ggcuaaccaguucucuuugua

SEQ ID NO: 1577 - RNA, 21 nt, Artificial Sequence
  Description of Artificial Sequence: Synthetic oligonucleotide
aaccaguucucuuuguaagga

SEQ ID NO: 1578 - RNA, 21 nt, Artificial Sequence
  Description of Artificial Sequence: Synthetic oligonucleotide
accaguucucuuuguaaggaa

SEQ ID NO: 1579 - RNA, 21 nt, Artificial Sequence
  Description of Artificial Sequence: Synthetic oligonucleotide
ccaguucucuuuguaaggaca

SEQ ID NO: 1580 - RNA, 21 nt, Artificial Sequence
  Description of Artificial Sequence: Synthetic oligonucleotide
aguucucuuuguaaggacuua

SEQ ID NO: 1581 - RNA, 21 nt, Artificial Sequence
  Description of Artificial Sequence: Synthetic oligonucleotide
guucucuuuguaaggacuuga

SEQ ID NO: 1582 - RNA, 21 nt, Artificial Sequence
  Description of Artificial Sequence: Synthetic oligonucleotide
uucucuuuguaaggacuugua

SEQ ID NO: 1583 - RNA, 21 nt, Artificial Sequence
  Description of Artificial Sequence: Synthetic oligonucleotide
cucuuuguaaggacuugugca

SEQ ID NO: 1584 - RNA, 21 nt, Artificial Sequence
  Description of Artificial Sequence: Synthetic oligonucleotide
ccauacugagggugaaauuaa

SEQ ID NO: 1585 - RNA, 21 nt, Artificial Sequence
  Description of Artificial Sequence: Synthetic oligonucleotide
auacugagggugaaauuaaga

SEQ ID NO: 1586 - RNA, 21 nt, Artificial Sequence
  Description of Artificial Sequence: Synthetic oligonucleotide
acugagggugaaauuaaggga

SEQ ID NO: 1587 - RNA, 21 nt, Artificial Sequence
  Description of Artificial Sequence: Synthetic oligonucleotide
cugagggugaaauuaagggaa

SEQ ID NO: 1588 - RNA, 21 nt, Artificial Sequence
  Description of Artificial Sequence: Synthetic oligonucleotide
ugagggugaaauuaagggaaa

SEQ ID NO: 1589 - RNA, 21 nt, Artificial Sequence
  Description of Artificial Sequence: Synthetic oligonucleotide
gagggugaaauuaagggaaga

SEQ ID NO: 1590 - RNA, 21 nt, Artificial Sequence
  Description of Artificial Sequence: Synthetic oligonucleotide
gccucucacucucaguuccaa

SEQ ID NO: 1591 - RNA, 21 nt, Artificial Sequence
  Description of Artificial Sequence: Synthetic oligonucleotide
cucucacucucaguuccacua

SEQ ID NO: 1592 - RNA, 21 nt, Artificial Sequence
  Description of Artificial Sequence: Synthetic oligonucleotide
ucucaguuccacucauccaaa

SEQ ID NO: 1593 - RNA, 21 nt, Artificial Sequence
  Description of Artificial Sequence: Synthetic oligonucleotide
uagguguuucugccuuguuga

SEQ ID NO: 1594 - RNA, 21 nt, Artificial Sequence
  Description of Artificial Sequence: Synthetic oligonucleotide
agguguuucugccuuguugaa

SEQ ID NO: 1595 - RNA, 21 nt, Artificial Sequence
  Description of Artificial Sequence: Synthetic oligonucleotide
guguuucugccuuguugacaa

SEQ ID NO: 1596 - RNA, 21 nt, Artificial Sequence
  Description of Artificial Sequence: Synthetic oligonucleotide
uguuucugccuuguugacaua

SEQ ID NO: 1597 - RNA, 21 nt, Artificial Sequence
  Description of Artificial Sequence: Synthetic oligonucleotide
gaagccaugcugucuguucua

SEQ ID NO: 1598 - RNA, 21 nt, Artificial Sequence
  Description of Artificial Sequence: Synthetic oligonucleotide
agcagcugaacauauacauaa

SEQ ID NO: 1599 - RNA, 21 nt, Artificial Sequence
  Description of Artificial Sequence: Synthetic oligonucleotide
agcugaacauauacauagaua

SEQ ID NO: 1600 - RNA, 21 nt, Artificial Sequence
  Description of Artificial Sequence: Synthetic oligonucleotide
gcugaacauauacauagauga

SEQ ID NO: 1601 - RNA, 21 nt, Artificial Sequence
  Description of Artificial Sequence: Synthetic oligonucleotide
cugaacauauacauagaugua

SEQ ID NO: 1602 - RNA, 21 nt, Artificial Sequence
  Description of Artificial Sequence: Synthetic oligonucleotide
gaacauauacauagauguuga

SEQ ID NO: 1603 - RNA, 21 nt, Artificial Sequence
  Description of Artificial Sequence: Synthetic oligonucleotide
aacauauacauagauguugca

SEQ ID NO: 1604 - RNA, 21 nt, Artificial Sequence
  Description of Artificial Sequence: Synthetic oligonucleotide
acauauacauagauguugcca

SEQ ID NO: 1605 - RNA, 21 nt, Artificial Sequence
  Description of Artificial Sequence: Synthetic oligonucleotide
gaguuguaguuggauuuguca

SEQ ID NO: 1606 - RNA, 21 nt, Artificial Sequence
  Description of Artificial Sequence: Synthetic oligonucleotide
aguuguaguuggauuugucua

SEQ ID NO: 1607 - RNA, 21 nt, Artificial Sequence
  Description of Artificial Sequence: Synthetic oligonucleotide
guuguaguuggauuugucuga

SEQ ID NO: 1608 - RNA, 21 nt, Artificial Sequence
  Description of Artificial Sequence: Synthetic oligonucleotide
uuguaguuggauuugucugua

SEQ ID NO: 1609 - RNA, 21 nt, Artificial Sequence
  Description of Artificial Sequence: Synthetic oligonucleotide
uguaguuggauuugucuguua

SEQ ID NO: 1610 - RNA, 21 nt, Artificial Sequence
  Description of Artificial Sequence: Synthetic oligonucleotide
guaguuggauuugucuguuua

SEQ ID NO: 1611 - RNA, 21 nt, Artificial Sequence
  Description of Artificial Sequence: Synthetic oligonucleotide
aguuggauuugucuguuuaua

SEQ ID NO: 1612 - RNA, 21 nt, Artificial Sequence
  Description of Artificial Sequence: Synthetic oligonucleotide
uuggauuugucuguuuaugca

SEQ ID NO: 1613 - RNA, 21 nt, Artificial Sequence
  Description of Artificial Sequence: Synthetic oligonucleotide
ggauuugucuguuuaugcuua

SEQ ID NO: 1614 - RNA, 21 nt, Artificial Sequence
  Description of Artificial Sequence: Synthetic oligonucleotide
gauuugucuguuuaugcuuga

SEQ ID NO: 1615 - RNA, 21 nt, Artificial Sequence
  Description of Artificial Sequence: Synthetic oligonucleotide
auuugucuguuuaugcuugga

SEQ ID NO: 1616 - RNA, 21 nt, Artificial Sequence
  Description of Artificial Sequence: Synthetic oligonucleotide
uuugucuguuuaugcuuggaa

SEQ ID NO: 1617 - RNA, 21 nt, Artificial Sequence
  Description of Artificial Sequence: Synthetic oligonucleotide
uugucuguuuaugcuuggaua

SEQ ID NO: 1618 - RNA, 21 nt, Artificial Sequence
  Description of Artificial Sequence: Synthetic oligonucleotide
ugucuguuuaugcuuggauua

SEQ ID NO: 1619 - RNA, 21 nt, Artificial Sequence
  Description of Artificial Sequence: Synthetic oligonucleotide
ucuguuuaugcuuggauucaa

SEQ ID NO: 1620 - RNA, 21 nt, Artificial Sequence
  Description of Artificial Sequence: Synthetic oligonucleotide
cuguuuaugcuuggauucaca

SEQ ID NO: 1621 - RNA, 21 nt, Artificial Sequence
  Description of Artificial Sequence: Synthetic oligonucleotide
uuuaugcuuggauucaccaga

SEQ ID NO: 1622 - RNA, 21 nt, Artificial Sequence
  Description of Artificial Sequence: Synthetic oligonucleotide
auucaccagagugacuaugaa

SEQ ID NO: 1623 - RNA, 21 nt, Artificial Sequence
  Description of Artificial Sequence: Synthetic oligonucleotide
ucaccagagugacuaugauaa

SEQ ID NO: 1624 - RNA, 21 nt, Artificial Sequence
  Description of Artificial Sequence: Synthetic oligonucleotide
caccagagugacuaugauaga

SEQ ID NO: 1625 - RNA, 21 nt, Artificial Sequence
  Description of Artificial Sequence: Synthetic oligonucleotide
accagagugacuaugauagua

SEQ ID NO: 1626 - RNA, 21 nt, Artificial Sequence
  Description of Artificial Sequence: Synthetic oligonucleotide
ccagagugacuaugauaguga

SEQ ID NO: 1627 - DNA, 23 bp, Artificial Sequence
  Description of Artificial Sequence: Synthetic oligonucleotide
  Description of Combined DNA/RNA Molecule: Synthetic oligonucleotide
ucaugcgagcutgggucacguga

SEQ ID NO: 1628 - DNA, 23 bp, Artificial Sequence
  Description of Artificial Sequence: Synthetic oligonucleotide
  Description of Combined DNA/RNA Molecule: Synthetic oligonucleotide
uccatgcgagcuugggucacgug

SEQ ID NO: 1629 - RNA, 23 nt, Artificial Sequence
  Description of Artificial Sequence: Synthetic oligonucleotide
uaccaugcgagcuugggucacgu

SEQ ID NO: 1630 - DNA, 23 bp, Artificial Sequence
  Description of Artificial Sequence: Synthetic oligonucleotide
  Description of Combined DNA/RNA Molecule: Synthetic oligonucleotide
ugaccatgcgagcuugggucacg

SEQ ID NO: 1631 - RNA, 23 nt, Artificial Sequence
  Description of Artificial Sequence: Synthetic oligonucleotide
uugaccaugcgagcuugggucac

SEQ ID NO: 1632 - RNA, 23 nt, Artificial Sequence
  Description of Artificial Sequence: Synthetic oligonucleotide
ucugaccaugcgagcuuggguca

SEQ ID NO: 1633 - RNA, 23 nt, Artificial Sequence
  Description of Artificial Sequence: Synthetic oligonucleotide
uacugaccaugcgagcuuggguc

SEQ ID NO: 1634 - DNA, 23 bp, Artificial Sequence
  Description of Artificial Sequence: Synthetic oligonucleotide
  Description of Combined DNA/RNA Molecule: Synthetic oligonucleotide
uuactgaccaugcgagcuugggu

SEQ ID NO: 1635 - RNA, 23 nt, Artificial Sequence
  Description of Artificial Sequence: Synthetic oligonucleotide
uuuacugaccaugcgagcuuggg

SEQ ID NO: 1636 - DNA, 23 bp, Artificial Sequence
  Description of Artificial Sequence: Synthetic oligonucleotide
  Description of Combined DNA/RNA Molecule: Synthetic oligonucleotide
uuugtagacuauuugcacacugc

SEQ ID NO: 1637 - DNA, 23 bp, Artificial Sequence
  Description of Artificial Sequence: Synthetic oligonucleotide
  Description of Combined DNA/RNA Molecule: Synthetic oligonucleotide
uuggtutguagacuauuugcaca

SEQ ID NO: 1638 - DNA, 23 bp, Artificial Sequence
  Description of Artificial Sequence: Synthetic oligonucleotide
  Description of Combined DNA/RNA Molecule: Synthetic oligonucleotide
uucaactgguuuguagacuauuu

SEQ ID NO: 1639 - RNA, 23 nt, Artificial Sequence
  Description of Artificial Sequence: Synthetic oligonucleotide
uggucaacugguuuguagacuau

SEQ ID NO: 1640 - DNA, 23 bp, Artificial Sequence
  Description of Artificial Sequence: Synthetic oligonucleotide
  Description of Combined DNA/RNA Molecule: Synthetic oligonucleotide
uaggtcaacugguuuguagacua

SEQ ID NO: 1641 - DNA, 23 bp, Artificial Sequence
  Description of Artificial Sequence: Synthetic oligonucleotide
  Description of Combined DNA/RNA Molecule: Synthetic oligonucleotide
uguutatgauggauguugccuaa

SEQ ID NO: 1642 - DNA, 23 bp, Artificial Sequence
  Description of Artificial Sequence: Synthetic oligonucleotide
  Description of Combined DNA/RNA Molecule: Synthetic oligonucleotide
uggutuaugauggauguugccua

SEQ ID NO: 1643 - DNA, 23 bp, Artificial Sequence
  Description of Artificial Sequence: Synthetic oligonucleotide
  Description of Combined DNA/RNA Molecule: Synthetic oligonucleotide
uuggtutaugauggauguugccu

SEQ ID NO: 1644 - DNA, 23 bp, Artificial Sequence
  Description of Artificial Sequence: Synthetic oligonucleotide
  Description of Combined DNA/RNA Molecule: Synthetic oligonucleotide
uccuggtuuaugauggauguugc

SEQ ID NO: 1645 - DNA, 23 bp, Artificial Sequence
  Description of Artificial Sequence: Synthetic oligonucleotide
  Description of Combined DNA/RNA Molecule: Synthetic oligonucleotide
uugaagtcaagcuucucagauuu

SEQ ID NO: 1646 - RNA, 23 nt, Artificial Sequence
  Description of Artificial Sequence: Synthetic oligonucleotide
uagucuaccaugucgaugcugcc

SEQ ID NO: 1647 - RNA, 23 nt, Artificial Sequence
  Description of Artificial Sequence: Synthetic oligonucleotide
ucaaauccuuuguugcugccacu

SEQ ID NO: 1648 - DNA, 23 bp, Artificial Sequence
  Description of Artificial Sequence: Synthetic oligonucleotide
  Description of Combined DNA/RNA Molecule: Synthetic oligonucleotide
utcaaatccuutguugcugccac

SEQ ID NO: 1649 - DNA, 23 bp, Artificial Sequence
  Description of Artificial Sequence: Synthetic oligonucleotide
  Description of Combined DNA/RNA Molecule: Synthetic oligonucleotide
uguutcaaauccuuuguugcugc

SEQ ID NO: 1650 - DNA, 23 bp, Artificial Sequence
  Description of Artificial Sequence: Synthetic oligonucleotide
  Description of Combined DNA/RNA Molecule: Synthetic oligonucleotide
uaagtutcaaauccuuuguugcu

SEQ ID NO: 1651 - DNA, 23 bp, Artificial Sequence
  Description of Artificial Sequence: Synthetic oligonucleotide
  Description of Combined DNA/RNA Molecule: Synthetic oligonucleotide
ucaagutucaaauccuuuguugc

SEQ ID NO: 1652 - DNA, 23 bp, Artificial Sequence
  Description of Artificial Sequence: Synthetic oligonucleotide
  Description of Combined DNA/RNA Molecule: Synthetic oligonucleotide
uccaagtuucaaauccuuuguug

SEQ ID NO: 1653 - RNA, 23 nt, Artificial Sequence
  Description of Artificial Sequence: Synthetic oligonucleotide
uaccaaguuucaaauccuuuguu

SEQ ID NO: 1654 - RNA, 23 nt, Artificial Sequence
  Description of Artificial Sequence: Synthetic oligonucleotide
ucaccaaguuucaaauccuuugu

SEQ ID NO: 1655 - DNA, 23 bp, Artificial Sequence
  Description of Artificial Sequence: Synthetic oligonucleotide
  Description of Combined DNA/RNA Molecule: Synthetic oligonucleotide
uacaccaaguutcaaauccuuug

SEQ ID NO: 1656 - RNA, 23 nt, Artificial Sequence
  Description of Artificial Sequence: Synthetic oligonucleotide
uaacacaccaaguuucaaauccu

SEQ ID NO: 1657 - DNA, 23 bp, Artificial Sequence
  Description of Artificial Sequence: Synthetic oligonucleotide
  Description of Combined DNA/RNA Molecule: Synthetic oligonucleotide
ucaaggtugacaucgucugccug

SEQ ID NO: 1658 - RNA, 23 nt, Artificial Sequence
  Description of Artificial Sequence: Synthetic oligonucleotide
uacacaagguugacaucgucugc

SEQ ID NO: 1659 - RNA, 23 nt, Artificial Sequence
  Description of Artificial Sequence: Synthetic oligonucleotide
uacucacacaagguugacaucgu

SEQ ID NO: 1660 - RNA, 23 nt, Artificial Sequence
  Description of Artificial Sequence: Synthetic oligonucleotide
uaaacaggguuucuguggagcag

SEQ ID NO: 1661 - RNA, 23 nt, Artificial Sequence
  Description of Artificial Sequence: Synthetic oligonucleotide
uuuccaaccuucagaacucaaua

SEQ ID NO: 1662 - RNA, 23 nt, Artificial Sequence
  Description of Artificial Sequence: Synthetic oligonucleotide
uguuccaaccuucagaacucaau

SEQ ID NO: 1663 - RNA, 23 nt, Artificial Sequence
  Description of Artificial Sequence: Synthetic oligonucleotide
uaagagaacugguuagcccuaaa

SEQ ID NO: 1664 - DNA, 23 bp, Artificial Sequence
  Description of Artificial Sequence: Synthetic oligonucleotide
  Description of Combined DNA/RNA Molecule: Synthetic oligonucleotide
ucaaagagaactgguuagcccua

SEQ ID NO: 1665 - RNA, 23 nt, Artificial Sequence
  Description of Artificial Sequence: Synthetic oligonucleotide
uacaaagagaacugguuagcccu

SEQ ID NO: 1666 - DNA, 23 bp, Artificial Sequence
  Description of Artificial Sequence: Synthetic oligonucleotide
  Description of Combined DNA/RNA Molecule: Synthetic oligonucleotide
uccutacaaagagaacugguuag

SEQ ID NO: 1667 - DNA, 23 bp, Artificial Sequence
  Description of Artificial Sequence: Synthetic oligonucleotide
  Description of Combined DNA/RNA Molecule: Synthetic oligonucleotide
uucctuacaaagagaacugguua

SEQ ID NO: 1668 - DNA, 23 bp, Artificial Sequence
  Description of Artificial Sequence: Synthetic oligonucleotide
  Description of Combined DNA/RNA Molecule: Synthetic oligonucleotide
uguccutacaaagagaacugguu

SEQ ID NO: 1669 - DNA, 23 bp, Artificial Sequence
  Description of Artificial Sequence: Synthetic oligonucleotide
  Description of Combined DNA/RNA Molecule: Synthetic oligonucleotide
uaagtccuuacaaagagaacugg

SEQ ID NO: 1670 - RNA, 23 nt, Artificial Sequence
  Description of Artificial Sequence: Synthetic oligonucleotide
ucaaguccuuacaaagagaacug

SEQ ID NO: 1671 - DNA, 23 bp, Artificial Sequence
  Description of Artificial Sequence: Synthetic oligonucleotide
  Description of Combined DNA/RNA Molecule: Synthetic oligonucleotide
uacaagtccuuacaaagagaacu

SEQ ID NO: 1672 - DNA, 23 bp, Artificial Sequence
  Description of Artificial Sequence: Synthetic oligonucleotide
  Description of Combined DNA/RNA Molecule: Synthetic oligonucleotide
ugcacaagucctuacaaagagaa

SEQ ID NO: 1673 - DNA, 23 bp, Artificial Sequence
  Description of Artificial Sequence: Synthetic oligonucleotide
  Description of Combined DNA/RNA Molecule: Synthetic oligonucleotide
uuaatutcacccucaguauggag

SEQ ID NO: 1674 - DNA, 23 bp, Artificial Sequence
  Description of Artificial Sequence: Synthetic oligonucleotide
  Description of Combined DNA/RNA Molecule: Synthetic oligonucleotide
ucuuaatuucacccucaguaugg

SEQ ID NO: 1675 - DNA, 23 bp, Artificial Sequence
  Description of Artificial Sequence: Synthetic oligonucleotide
  Description of Combined DNA/RNA Molecule: Synthetic oligonucleotide
uccctuaauuucacccucaguau

SEQ ID NO: 1676 - DNA, 23 bp, Artificial Sequence
  Description of Artificial Sequence: Synthetic oligonucleotide
  Description of Combined DNA/RNA Molecule: Synthetic oligonucleotide
utcccutaauutcacccucagua

SEQ ID NO: 1677 - DNA, 23 bp, Artificial Sequence
  Description of Artificial Sequence: Synthetic oligonucleotide
  Description of Combined DNA/RNA Molecule: Synthetic oligonucleotide
uuuccctuaauuucacccucagu

SEQ ID NO: 1678 - RNA, 23 nt, Artificial Sequence
  Description of Artificial Sequence: Synthetic oligonucleotide
ucuucccuuaauuucacccucag

SEQ ID NO: 1679 - RNA, 23 nt, Artificial Sequence
  Description of Artificial Sequence: Synthetic oligonucleotide
uuggaacugagagugagaggcug

SEQ ID NO: 1680 - RNA, 23 nt, Artificial Sequence
  Description of Artificial Sequence: Synthetic oligonucleotide
uaguggaacugagagugagaggc

SEQ ID NO: 1681 - DNA, 23 bp, Artificial Sequence
  Description of Artificial Sequence: Synthetic oligonucleotide
  Description of Combined DNA/RNA Molecule: Synthetic oligonucleotide
uuuggatgaguggaacugagagu

SEQ ID NO: 1682 - RNA, 23 nt, Artificial Sequence
  Description of Artificial Sequence: Synthetic oligonucleotide
ucaacaaggcagaaacaccuagg

SEQ ID NO: 1683 - DNA, 23 bp, Artificial Sequence
  Description of Artificial Sequence: Synthetic oligonucleotide
  Description of Combined DNA/RNA Molecule: Synthetic oligonucleotide
utcaacaaggcagaaacaccuag

SEQ ID NO: 1684 - RNA, 23 nt, Artificial Sequence
  Description of Artificial Sequence: Synthetic oligonucleotide
uugucaacaaggcagaaacaccu

SEQ ID NO: 1685 - DNA, 23 bp, Artificial Sequence
  Description of Artificial Sequence: Synthetic oligonucleotide
  Description of Combined DNA/RNA Molecule: Synthetic oligonucleotide
uaugtcaacaaggcagaaacacc

SEQ ID NO: 1686 - RNA, 23 nt, Artificial Sequence
  Description of Artificial Sequence: Synthetic oligonucleotide
uagaacagacagcauggcuucca

SEQ ID NO: 1687 - RNA, 23 nt, Artificial Sequence
  Description of Artificial Sequence: Synthetic oligonucleotide
uuauguauauguucagcugcucc

SEQ ID NO: 1688 - DNA, 23 bp, Artificial Sequence
  Description of Artificial Sequence: Synthetic oligonucleotide
  Description of Combined DNA/RNA Molecule: Synthetic oligonucleotide
uauctatguauauguucagcugc

SEQ ID NO: 1689 - DNA, 23 bp, Artificial Sequence
  Description of Artificial Sequence: Synthetic oligonucleotide
  Description of Combined DNA/RNA Molecule: Synthetic oligonucleotide
ucaucuauguatauguucagcug

SEQ ID NO: 1690 - DNA, 23 bp, Artificial Sequence
  Description of Artificial Sequence: Synthetic oligonucleotide
  Description of Combined DNA/RNA Molecule: Synthetic oligonucleotide
uacatctauguauauguucagcu

SEQ ID NO: 1691 - DNA, 23 bp, Artificial Sequence
  Description of Artificial Sequence: Synthetic oligonucleotide
  Description of Combined DNA/RNA Molecule: Synthetic oligonucleotide
ucaacatcuauguauauguucag

SEQ ID NO: 1692 - RNA, 23 nt, Artificial Sequence
  Description of Artificial Sequence: Synthetic oligonucleotide
ugcaacaucuauguauauguuca

SEQ ID NO: 1693 - RNA, 23 nt, Artificial Sequence
  Description of Artificial Sequence: Synthetic oligonucleotide
uggcaacaucuauguauauguuc

SEQ ID NO: 1694 - RNA, 23 nt, Artificial Sequence
  Description of Artificial Sequence: Synthetic oligonucleotide
ugacaaauccaacuacaacucaa

SEQ ID NO: 1695 - RNA, 23 nt, Artificial Sequence
  Description of Artificial Sequence: Synthetic oligonucleotide
uagacaaauccaacuacaacuca

SEQ ID NO: 1696 - RNA, 23 nt, Artificial Sequence
  Description of Artificial Sequence: Synthetic oligonucleotide
ucagacaaauccaacuacaacuc

SEQ ID NO: 1697 - RNA, 23 nt, Artificial Sequence
  Description of Artificial Sequence: Synthetic oligonucleotide
uacagacaaauccaacuacaacu

SEQ ID NO: 1698 - RNA, 23 nt, Artificial Sequence
  Description of Artificial Sequence: Synthetic oligonucleotide
uaacagacaaauccaacuacaac

SEQ ID NO: 1699 - RNA, 23 nt, Artificial Sequence
  Description of Artificial Sequence: Synthetic oligonucleotide
uaaacagacaaauccaacuacaa

SEQ ID NO: 1700 - RNA, 23 nt, Artificial Sequence
  Description of Artificial Sequence: Synthetic oligonucleotide
uauaaacagacaaauccaacuac

SEQ ID NO: 1701 - DNA, 23 bp, Artificial Sequence
  Description of Artificial Sequence: Synthetic oligonucleotide
  Description of Combined DNA/RNA Molecule: Synthetic oligonucleotide
ugcataaacagacaaauccaacu

SEQ ID NO: 1702 - DNA, 23 bp, Artificial Sequence
  Description of Artificial Sequence: Synthetic oligonucleotide
  Description of Combined DNA/RNA Molecule: Synthetic oligonucleotide
uaagcataaacagacaaauccaa

SEQ ID NO: 1703 - RNA, 23 nt, Artificial Sequence
  Description of Artificial Sequence: Synthetic oligonucleotide
ucaagcauaaacagacaaaucca

SEQ ID NO: 1704 - RNA, 23 nt, Artificial Sequence
  Description of Artificial Sequence: Synthetic oligonucleotide
uccaagcauaaacagacaaaucc

SEQ ID NO: 1705 - RNA, 23 nt, Artificial Sequence
  Description of Artificial Sequence: Synthetic oligonucleotide
uuccaagcauaaacagacaaauc

SEQ ID NO: 1706 - RNA, 23 nt, Artificial Sequence
  Description of Artificial Sequence: Synthetic oligonucleotide
uauccaagcauaaacagacaaau

SEQ ID NO: 1707 - RNA, 23 nt, Artificial Sequence
  Description of Artificial Sequence: Synthetic oligonucleotide
uaauccaagcauaaacagacaaa

SEQ ID NO: 1708 - RNA, 23 nt, Artificial Sequence
  Description of Artificial Sequence: Synthetic oligonucleotide
uugaauccaagcauaaacagaca

SEQ ID NO: 1709 - DNA, 23 bp, Artificial Sequence
  Description of Artificial Sequence: Synthetic oligonucleotide
  Description of Combined DNA/RNA Molecule: Synthetic oligonucleotide
ugugaatccaagcauaaacagac

SEQ ID NO: 1710 - RNA, 23 nt, Artificial Sequence
  Description of Artificial Sequence: Synthetic oligonucleotide
ucuggugaauccaagcauaaaca

SEQ ID NO: 1711 - DNA, 23 bp, Artificial Sequence
  Description of Artificial Sequence: Synthetic oligonucleotide
  Description of Combined DNA/RNA Molecule: Synthetic oligonucleotide
uucatagucacucuggugaaucc

SEQ ID NO: 1712 - DNA, 23 bp, Artificial Sequence
  Description of Artificial Sequence: Synthetic oligonucleotide
  Description of Combined DNA/RNA Molecule: Synthetic oligonucleotide
uuaucatagucacucuggugaau

SEQ ID NO: 1713 - DNA, 23 bp, Artificial Sequence
  Description of Artificial Sequence: Synthetic oligonucleotide
  Description of Combined DNA/RNA Molecule: Synthetic oligonucleotide
ucuatcauagucacucuggugaa

SEQ ID NO: 1714 - RNA, 23 nt, Artificial Sequence
  Description of Artificial Sequence: Synthetic oligonucleotide
uacuaucauagucacucugguga

SEQ ID NO: 1715 - DNA, 23 bp, Artificial Sequence
  Description of Artificial Sequence: Synthetic oligonucleotide
  Description of Combined DNA/RNA Molecule: Synthetic oligonucleotide
ucactatcauagucacucuggug

SEQ ID NO: 1716 - RNA, 21 nt, Artificial Sequence
  Description of Artificial Sequence: Synthetic oligonucleotide
acgugacccaagcucgcauga

SEQ ID NO: 1717 - RNA, 21 nt, Artificial Sequence
  Description of Artificial Sequence: Synthetic oligonucleotide
cgugacccaagcucgcaugga

SEQ ID NO: 1718 - RNA, 21 nt, Artificial Sequence
  Description of Artificial Sequence: Synthetic oligonucleotide
gugacccaagcucgcauggua

SEQ ID NO: 1719 - RNA, 21 nt, Artificial Sequence
  Description of Artificial Sequence: Synthetic oligonucleotide
ugacccaagcucgcaugguca

SEQ ID NO: 1720 - RNA, 21 nt, Artificial Sequence
  Description of Artificial Sequence: Synthetic oligonucleotide
gacccaagcucgcauggucaa

SEQ ID NO: 1721 - RNA, 21 nt, Artificial Sequence
  Description of Artificial Sequence: Synthetic oligonucleotide
acccaagcucgcauggucaga

SEQ ID NO: 1722 - RNA, 21 nt, Artificial Sequence
  Description of Artificial Sequence: Synthetic oligonucleotide
cccaagcucgcauggucagua

SEQ ID NO: 1723 - RNA, 21 nt, Artificial Sequence
  Description of Artificial Sequence: Synthetic oligonucleotide
ccaagcucgcauggucaguaa

SEQ ID NO: 1724 - RNA, 21 nt, Artificial Sequence
  Description of Artificial Sequence: Synthetic oligonucleotide
caagcucgcauggucaguaaa

SEQ ID NO: 1725 - RNA, 21 nt, Artificial Sequence
  Description of Artificial Sequence: Synthetic oligonucleotide
agugugcaaauagucuacaaa

SEQ ID NO: 1726 - RNA, 21 nt, Artificial Sequence
  Description of Artificial Sequence: Synthetic oligonucleotide
ugcaaauagucuacaaaccaa

SEQ ID NO: 1727 - RNA, 21 nt, Artificial Sequence
  Description of Artificial Sequence: Synthetic oligonucleotide
auagucuacaaaccaguugaa

SEQ ID NO: 1728 - RNA, 21 nt, Artificial Sequence
  Description of Artificial Sequence: Synthetic oligonucleotide
agucuacaaaccaguugacca

SEQ ID NO: 1729 - RNA, 21 nt, Artificial Sequence
  Description of Artificial Sequence: Synthetic oligonucleotide
gucuacaaaccaguugaccua

SEQ ID NO: 1730 - RNA, 21 nt, Artificial Sequence
  Description of Artificial Sequence: Synthetic oligonucleotide
aggcaacauccaucauaaaca

SEQ ID NO: 1731 - RNA, 21 nt, Artificial Sequence
  Description of Artificial Sequence: Synthetic oligonucleotide
ggcaacauccaucauaaacca

SEQ ID NO: 1732 - RNA, 21 nt, Artificial Sequence
  Description of Artificial Sequence: Synthetic oligonucleotide
gcaacauccaucauaaaccaa

SEQ ID NO: 1733 - RNA, 21 nt, Artificial Sequence
  Description of Artificial Sequence: Synthetic oligonucleotide
aacauccaucauaaaccagga

SEQ ID NO: 1734 - RNA, 21 nt, Artificial Sequence
  Description of Artificial Sequence: Synthetic oligonucleotide
aucugagaagcuugacuucaa

SEQ ID NO: 1735 - RNA, 21 nt, Artificial Sequence
  Description of Artificial Sequence: Synthetic oligonucleotide
cagcaucgacaugguagacua

SEQ ID NO: 1736 - RNA, 21 nt, Artificial Sequence
  Description of Artificial Sequence: Synthetic oligonucleotide
uggcagcaacaaaggauuuga

SEQ ID NO: 1737 - RNA, 21 nt, Artificial Sequence
  Description of Artificial Sequence: Synthetic oligonucleotide
ggcagcaacaaaggauuugaa

SEQ ID NO: 1738 - RNA, 21 nt, Artificial Sequence
  Description of Artificial Sequence: Synthetic oligonucleotide
agcaacaaaggauuugaaaca

SEQ ID NO: 1739 - RNA, 21 nt, Artificial Sequence
  Description of Artificial Sequence: Synthetic oligonucleotide
caacaaaggauuugaaacuua

SEQ ID NO: 1740 - RNA, 21 nt, Artificial Sequence
  Description of Artificial Sequence: Synthetic oligonucleotide
aacaaaggauuugaaacuuga

SEQ ID NO: 1741 - RNA, 21 nt, Artificial Sequence
  Description of Artificial Sequence: Synthetic oligonucleotide
acaaaggauuugaaacuugga

SEQ ID NO: 1742 - RNA, 21 nt, Artificial Sequence
  Description of Artificial Sequence: Synthetic oligonucleotide
caaaggauuugaaacuuggua

SEQ ID NO: 1743 - RNA, 21 nt, Artificial Sequence
  Description of Artificial Sequence: Synthetic oligonucleotide
aaaggauuugaaacuugguga

SEQ ID NO: 1744 - RNA, 21 nt, Artificial Sequence
  Description of Artificial Sequence: Synthetic oligonucleotide
aaggauuugaaacuuggugua

SEQ ID NO: 1745 - RNA, 21 nt, Artificial Sequence
  Description of Artificial Sequence: Synthetic oligonucleotide
gauuugaaacuugguguguua

SEQ ID NO: 1746 - RNA, 21 nt, Artificial Sequence
  Description of Artificial Sequence: Synthetic oligonucleotide
ggcagacgaugucaaccuuga

SEQ ID NO: 1747 - RNA, 21 nt, Artificial Sequence
  Description of Artificial Sequence: Synthetic oligonucleotide
agacgaugucaaccuugugua

SEQ ID NO: 1748 - RNA, 21 nt, Artificial Sequence
  Description of Artificial Sequence: Synthetic oligonucleotide
gaugucaaccuugugugagua

SEQ ID NO: 1749 - RNA, 21 nt, Artificial Sequence
  Description of Artificial Sequence: Synthetic oligonucleotide
gcuccacagaaacccuguuua

SEQ ID NO: 1750 - RNA, 21 nt, Artificial Sequence
  Description of Artificial Sequence: Synthetic oligonucleotide
uugaguucugaagguuggaaa

SEQ ID NO: 1751 - RNA, 21 nt, Artificial Sequence
  Description of Artificial Sequence: Synthetic oligonucleotide
ugaguucugaagguuggaaca

SEQ ID NO: 1752 - RNA, 21 nt, Artificial Sequence
  Description of Artificial Sequence: Synthetic oligonucleotide
uagggcuaaccaguucucuua

SEQ ID NO: 1753 - RNA, 21 nt, Artificial Sequence
  Description of Artificial Sequence: Synthetic oligonucleotide
gggcuaaccaguucucuuuga

SEQ ID NO: 1754 - RNA, 21 nt, Artificial Sequence
  Description of Artificial Sequence: Synthetic oligonucleotide
ggcuaaccaguucucuuugua

SEQ ID NO: 1755 - RNA, 21 nt, Artificial Sequence
  Description of Artificial Sequence: Synthetic oligonucleotide
aaccaguucucuuuguaagga

SEQ ID NO: 1756 - RNA, 21 nt, Artificial Sequence
  Description of Artificial Sequence: Synthetic oligonucleotide
accaguucucuuuguaaggaa

SEQ ID NO: 1757 - RNA, 21 nt, Artificial Sequence
  Description of Artificial Sequence: Synthetic oligonucleotide
ccaguucucuuuguaaggaca

SEQ ID NO: 1758 - RNA, 21 nt, Artificial Sequence
  Description of Artificial Sequence: Synthetic oligonucleotide
aguucucuuuguaaggacuua

SEQ ID NO: 1759 - RNA, 21 nt, Artificial Sequence
  Description of Artificial Sequence: Synthetic oligonucleotide
guucucuuuguaaggacuuga

SEQ ID NO: 1760 - RNA, 21 nt, Artificial Sequence
  Description of Artificial Sequence: Synthetic oligonucleotide
uucucuuuguaaggacuugua

SEQ ID NO: 1761 - RNA, 21 nt, Artificial Sequence
  Description of Artificial Sequence: Synthetic oligonucleotide
cucuuuguaaggacuugugca

SEQ ID NO: 1762 - RNA, 21 nt, Artificial Sequence
  Description of Artificial Sequence: Synthetic oligonucleotide
ccauacugagggugaaauuaa

SEQ ID NO: 1763 - RNA, 21 nt, Artificial Sequence
  Description of Artificial Sequence: Synthetic oligonucleotide
auacugagggugaaauuaaga

SEQ ID NO: 1764 - RNA, 21 nt, Artificial Sequence
  Description of Artificial Sequence: Synthetic oligonucleotide
acugagggugaaauuaaggga

SEQ ID NO: 1765 - RNA, 21 nt, Artificial Sequence
  Description of Artificial Sequence: Synthetic oligonucleotide
cugagggugaaauuaagggaa

SEQ ID NO: 1766 - RNA, 21 nt, Artificial Sequence
  Description of Artificial Sequence: Synthetic oligonucleotide
ugagggugaaauuaagggaaa

SEQ ID NO: 1767 - RNA, 21 nt, Artificial Sequence
  Description of Artificial Sequence: Synthetic oligonucleotide
gagggugaaauuaagggaaga

SEQ ID NO: 1768 - RNA, 21 nt, Artificial Sequence
  Description of Artificial Sequence: Synthetic oligonucleotide
gccucucacucucaguuccaa

SEQ ID NO: 1769 - RNA, 21 nt, Artificial Sequence
  Description of Artificial Sequence: Synthetic oligonucleotide
cucucacucucaguuccacua

SEQ ID NO: 1770 - RNA, 21 nt, Artificial Sequence
  Description of Artificial Sequence: Synthetic oligonucleotide
ucucaguuccacucauccaaa

SEQ ID NO: 1771 - RNA, 21 nt, Artificial Sequence
  Description of Artificial Sequence: Synthetic oligonucleotide
uagguguuucugccuuguuga

SEQ ID NO: 1772 - RNA, 21 nt, Artificial Sequence
  Description of Artificial Sequence: Synthetic oligonucleotide
agguguuucugccuuguugaa

SEQ ID NO: 1773 - RNA, 21 nt, Artificial Sequence
  Description of Artificial Sequence: Synthetic oligonucleotide
guguuucugccuuguugacaa

SEQ ID NO: 1774 - RNA, 21 nt, Artificial Sequence
  Description of Artificial Sequence: Synthetic oligonucleotide
uguuucugccuuguugacaua

SEQ ID NO: 1775 - RNA, 21 nt, Artificial Sequence
  Description of Artificial Sequence: Synthetic oligonucleotide
gaagccaugcugucuguucua

SEQ ID NO: 1776 - RNA, 21 nt, Artificial Sequence
  Description of Artificial Sequence: Synthetic oligonucleotide
agcagcugaacauauacauaa

SEQ ID NO: 1777 - RNA, 21 nt, Artificial Sequence
  Description of Artificial Sequence: Synthetic oligonucleotide
agcugaacauauacauagaua

SEQ ID NO: 1778 - RNA, 21 nt, Artificial Sequence
  Description of Artificial Sequence: Synthetic oligonucleotide
gcugaacauauacauagauga

SEQ ID NO: 1779 - RNA, 21 nt, Artificial Sequence
  Description of Artificial Sequence: Synthetic oligonucleotide
cugaacauauacauagaugua

SEQ ID NO: 1780 - RNA, 21 nt, Artificial Sequence
  Description of Artificial Sequence: Synthetic oligonucleotide
gaacauauacauagauguuga

SEQ ID NO: 1781 - RNA, 21 nt, Artificial Sequence
  Description of Artificial Sequence: Synthetic oligonucleotide
aacauauacauagauguugca

SEQ ID NO: 1782 - RNA, 21 nt, Artificial Sequence
  Description of Artificial Sequence: Synthetic oligonucleotide
acauauacauagauguugcca

SEQ ID NO: 1783 - RNA, 21 nt, Artificial Sequence
  Description of Artificial Sequence: Synthetic oligonucleotide
gaguuguaguuggauuuguca

SEQ ID NO: 1784 - RNA, 21 nt, Artificial Sequence
  Description of Artificial Sequence: Synthetic oligonucleotide
aguuguaguuggauuugucua

SEQ ID NO: 1785 - RNA, 21 nt, Artificial Sequence
  Description of Artificial Sequence: Synthetic oligonucleotide
guuguaguuggauuugucuga

SEQ ID NO: 1786 - RNA, 21 nt, Artificial Sequence
  Description of Artificial Sequence: Synthetic oligonucleotide
uuguaguuggauuugucugua

SEQ ID NO: 1787 - RNA, 21 nt, Artificial Sequence
  Description of Artificial Sequence: Synthetic oligonucleotide
uguaguuggauuugucuguua

SEQ ID NO: 1788 - RNA, 21 nt, Artificial Sequence
  Description of Artificial Sequence: Synthetic oligonucleotide
guaguuggauuugucuguuua

SEQ ID NO: 1789 - RNA, 21 nt, Artificial Sequence
  Description of Artificial Sequence: Synthetic oligonucleotide
aguuggauuugucuguuuaua

SEQ ID NO: 1790 - RNA, 21 nt, Artificial Sequence
  Description of Artificial Sequence: Synthetic oligonucleotide
uuggauuugucuguuuaugca

SEQ ID NO: 1791 - RNA, 21 nt, Artificial Sequence
  Description of Artificial Sequence: Synthetic oligonucleotide
ggauuugucuguuuaugcuua

SEQ ID NO: 1792 - RNA, 21 nt, Artificial Sequence
  Description of Artificial Sequence: Synthetic oligonucleotide
gauuugucuguuuaugcuuga

SEQ ID NO: 1793 - RNA, 21 nt, Artificial Sequence
  Description of Artificial Sequence: Synthetic oligonucleotide
auuugucuguuuaugcuugga

SEQ ID NO: 1794 - RNA, 21 nt, Artificial Sequence
  Description of Artificial Sequence: Synthetic oligonucleotide
uuugucuguuuaugcuuggaa

SEQ ID NO: 1795 - RNA, 21 nt, Artificial Sequence
  Description of Artificial Sequence: Synthetic oligonucleotide
uugucuguuuaugcuuggaua

SEQ ID NO: 1796 - RNA, 21 nt, Artificial Sequence
  Description of Artificial Sequence: Synthetic oligonucleotide
ugucuguuuaugcuuggauua

SEQ ID NO: 1797 - RNA, 21 nt, Artificial Sequence
  Description of Artificial Sequence: Synthetic oligonucleotide
ucuguuuaugcuuggauucaa

SEQ ID NO: 1798 - RNA, 21 nt, Artificial Sequence
  Description of Artificial Sequence: Synthetic oligonucleotide
cuguuuaugcuuggauucaca

SEQ ID NO: 1799 - RNA, 21 nt, Artificial Sequence
  Description of Artificial Sequence: Synthetic oligonucleotide
uuuaugcuuggauucaccaga

SEQ ID NO: 1800 - RNA, 21 nt, Artificial Sequence
  Description of Artificial Sequence: Synthetic oligonucleotide
auucaccagagugacuaugaa

SEQ ID NO: 1801 - RNA, 21 nt, Artificial Sequence
  Description of Artificial Sequence: Synthetic oligonucleotide
ucaccagagugacuaugauaa

SEQ ID NO: 1802 - RNA, 21 nt, Artificial Sequence
  Description of Artificial Sequence: Synthetic oligonucleotide
caccagagugacuaugauaga

SEQ ID NO: 1803 - RNA, 21 nt, Artificial Sequence
  Description of Artificial Sequence: Synthetic oligonucleotide
accagagugacuaugauagua

SEQ ID NO: 1804 - RNA, 21 nt, Artificial Sequence
  Description of Artificial Sequence: Synthetic oligonucleotide
ccagagugacuaugauaguga

SEQ ID NO: 1805 - DNA, 23 bp, Artificial Sequence
  Description of Artificial Sequence: Synthetic oligonucleotide
  Description of Combined DNA/RNA Molecule: Synthetic oligonucleotide
ucaugcgagcutgggucacguga

SEQ ID NO: 1806 - DNA, 23 bp, Artificial Sequence
  Description of Artificial Sequence: Synthetic oligonucleotide
  Description of Combined DNA/RNA Molecule: Synthetic oligonucleotide
uccatgcgagcuugggucacgug

SEQ ID NO: 1807 - DNA, 23 bp, Artificial Sequence
  Description of Artificial Sequence: Synthetic oligonucleotide
  Description of Combined DNA/RNA Molecule: Synthetic oligonucleotide
uaccaugcgagcuugggucacgu

SEQ ID NO: 1808 - DNA, 23 bp, Artificial Sequence
  Description of Artificial Sequence: Synthetic oligonucleotide
  Description of Combined DNA/RNA Molecule: Synthetic oligonucleotide
ugaccatgcgagcuugggucacg

SEQ ID NO: 1809 - DNA, 23 bp, Artificial Sequence
  Description of Artificial Sequence: Synthetic oligonucleotide
  Description of Combined DNA/RNA Molecule: Synthetic oligonucleotide
uugaccaugcgagcuugggucac

SEQ ID NO: 1810 - DNA, 23 bp, Artificial Sequence
  Description of Artificial Sequence: Synthetic oligonucleotide
  Description of Combined DNA/RNA Molecule: Synthetic oligonucleotide
ucugaccaugcgagcuuggguca

SEQ ID NO: 1811 - DNA, 23 bp, Artificial Sequence
  Description of Artificial Sequence: Synthetic oligonucleotide
  Description of Combined DNA/RNA Molecule: Synthetic oligonucleotide
uacugaccaugcgagcuuggguc

SEQ ID NO: 1812 - DNA, 23 bp, Artificial Sequence
  Description of Artificial Sequence: Synthetic oligonucleotide
  Description of Combined DNA/RNA Molecule: Synthetic oligonucleotide
uuactgaccaugcgagcuugggu

SEQ ID NO: 1813 - DNA, 23 bp, Artificial Sequence
  Description of Artificial Sequence: Synthetic oligonucleotide
  Description of Combined DNA/RNA Molecule: Synthetic oligonucleotide
uuuacugaccaugcgagcuuggg

SEQ ID NO: 1814 - DNA, 23 bp, Artificial Sequence
  Description of Artificial Sequence: Synthetic oligonucleotide
  Description of Combined DNA/RNA Molecule: Synthetic oligonucleotide
uuugtagacuauuugcacacugc

SEQ ID NO: 1815 - DNA, 23 bp, Artificial Sequence
  Description of Artificial Sequence: Synthetic oligonucleotide
  Description of Combined DNA/RNA Molecule: Synthetic oligonucleotide
uuggtutguagacuauuugcaca

SEQ ID NO: 1816 - DNA, 23 bp, Artificial Sequence
  Description of Artificial Sequence: Synthetic oligonucleotide
  Description of Combined DNA/RNA Molecule: Synthetic oligonucleotide
uucaactgguuuguagacuauuu

SEQ ID NO: 1817 - DNA, 23 bp, Artificial Sequence
  Description of Artificial Sequence: Synthetic oligonucleotide
  Description of Combined DNA/RNA Molecule: Synthetic oligonucleotide
uggucaacugguuuguagacuau

SEQ ID NO: 1818 - DNA, 23 bp, Artificial Sequence
  Description of Artificial Sequence: Synthetic oligonucleotide
  Description of Combined DNA/RNA Molecule: Synthetic oligonucleotide
uaggtcaacugguuuguagacua

SEQ ID NO: 1819 - DNA, 23 bp, Artificial Sequence
  Description of Artificial Sequence: Synthetic oligonucleotide
  Description of Combined DNA/RNA Molecule: Synthetic oligonucleotide
uguutatgauggauguugccuaa

SEQ ID NO: 1820 - DNA, 23 bp, Artificial Sequence
  Description of Artificial Sequence: Synthetic oligonucleotide
  Description of Combined DNA/RNA Molecule: Synthetic oligonucleotide
uggutuaugauggauguugccua

SEQ ID NO: 1821 - DNA, 23 bp, Artificial Sequence
  Description of Artificial Sequence: Synthetic oligonucleotide
  Description of Combined DNA/RNA Molecule: Synthetic oligonucleotide
uuggtutaugauggauguugccu

SEQ ID NO: 1822 - DNA, 23 bp, Artificial Sequence
  Description of Artificial Sequence: Synthetic oligonucleotide
  Description of Combined DNA/RNA Molecule: Synthetic oligonucleotide
uccuggtuuaugauggauguugc

SEQ ID NO: 1823 - DNA, 23 bp, Artificial Sequence
  Description of Artificial Sequence: Synthetic oligonucleotide
  Description of Combined DNA/RNA Molecule: Synthetic oligonucleotide
uugaagtcaagcuucucagauuu

SEQ ID NO: 1824 - DNA, 23 bp, Artificial Sequence
  Description of Artificial Sequence: Synthetic oligonucleotide
  Description of Combined DNA/RNA Molecule: Synthetic oligonucleotide
uagucuaccaugucgaugcugcc

SEQ ID NO: 1825 - DNA, 23 bp, Artificial Sequence
  Description of Artificial Sequence: Synthetic oligonucleotide
  Description of Combined DNA/RNA Molecule: Synthetic oligonucleotide
ucaaauccuuuguugcugccacu

SEQ ID NO: 1826 - DNA, 23 bp, Artificial Sequence
  Description of Artificial Sequence: Synthetic oligonucleotide
  Description of Combined DNA/RNA Molecule: Synthetic oligonucleotide
utcaaatccuutguugcugccac

SEQ ID NO: 1827 - DNA, 23 bp, Artificial Sequence
  Description of Artificial Sequence: Synthetic oligonucleotide
  Description of Combined DNA/RNA Molecule: Synthetic oligonucleotide
uguutcaaauccuuuguugcugc

SEQ ID NO: 1828 - DNA, 23 bp, Artificial Sequence
  Description of Artificial Sequence: Synthetic oligonucleotide
  Description of Combined DNA/RNA Molecule: Synthetic oligonucleotide
uaagtutcaaauccuuuguugcu

SEQ ID NO: 1829 - DNA, 23 bp, Artificial Sequence
  Description of Artificial Sequence: Synthetic oligonucleotide
  Description of Combined DNA/RNA Molecule: Synthetic oligonucleotide
ucaagutucaaauccuuuguugc

SEQ ID NO: 1830 - DNA, 23 bp, Artificial Sequence
  Description of Artificial Sequence: Synthetic oligonucleotide
  Description of Combined DNA/RNA Molecule: Synthetic oligonucleotide
uccaagtuucaaauccuuuguug

SEQ ID NO: 1831 - DNA, 23 bp, Artificial Sequence
  Description of Artificial Sequence: Synthetic oligonucleotide
  Description of Combined DNA/RNA Molecule: Synthetic oligonucleotide
uaccaaguuucaaauccuuuguu

SEQ ID NO: 1832 - DNA, 23 bp, Artificial Sequence
  Description of Artificial Sequence: Synthetic oligonucleotide
  Description of Combined DNA/RNA Molecule: Synthetic oligonucleotide
ucaccaaguuucaaauccuuugu

SEQ ID NO: 1833 - DNA, 23 bp, Artificial Sequence
  Description of Artificial Sequence: Synthetic oligonucleotide
  Description of Combined DNA/RNA Molecule: Synthetic oligonucleotide
uacaccaaguutcaaauccuuug

SEQ ID NO: 1834 - DNA, 23 bp, Artificial Sequence
  Description of Artificial Sequence: Synthetic oligonucleotide
  Description of Combined DNA/RNA Molecule: Synthetic oligonucleotide
uaacacaccaaguuucaaauccu

SEQ ID NO: 1835 - DNA, 23 bp, Artificial Sequence
  Description of Artificial Sequence: Synthetic oligonucleotide
  Description of Combined DNA/RNA Molecule: Synthetic oligonucleotide
ucaaggtugacaucgucugccug

SEQ ID NO: 1836 - DNA, 23 bp, Artificial Sequence
  Description of Artificial Sequence: Synthetic oligonucleotide
  Description of Combined DNA/RNA Molecule: Synthetic oligonucleotide
uacacaagguugacaucgucugc

SEQ ID NO: 1837 - DNA, 23 bp, Artificial Sequence
  Description of Artificial Sequence: Synthetic oligonucleotide
  Description of Combined DNA/RNA Molecule: Synthetic oligonucleotide
uacucacacaagguugacaucgu

SEQ ID NO: 1838 - DNA, 23 bp, Artificial Sequence
  Description of Artificial Sequence: Synthetic oligonucleotide
  Description of Combined DNA/RNA Molecule: Synthetic oligonucleotide
uaaacaggguuucuguggagcag

SEQ ID NO: 1839 - DNA, 23 bp, Artificial Sequence
  Description of Artificial Sequence: Synthetic oligonucleotide
  Description of Combined DNA/RNA Molecule: Synthetic oligonucleotide
uuuccaaccuucagaacucaaua

SEQ ID NO: 1840 - DNA, 23 bp, Artificial Sequence
  Description of Artificial Sequence: Synthetic oligonucleotide
  Description of Combined DNA/RNA Molecule: Synthetic oligonucleotide
uguuccaaccuucagaacucaau

SEQ ID NO: 1841 - DNA, 23 bp, Artificial Sequence
  Description of Artificial Sequence: Synthetic oligonucleotide
  Description of Combined DNA/RNA Molecule: Synthetic oligonucleotide
uaagagaacugguuagcccuaaa

SEQ ID NO: 1842 - DNA, 23 bp, Artificial Sequence
  Description of Artificial Sequence: Synthetic oligonucleotide
  Description of Combined DNA/RNA Molecule: Synthetic oligonucleotide
ucaaagagaactgguuagcccua

SEQ ID NO: 1843 - DNA, 23 bp, Artificial Sequence
  Description of Artificial Sequence: Synthetic oligonucleotide
  Description of Combined DNA/RNA Molecule: Synthetic oligonucleotide
uacaaagagaacugguuagcccu

SEQ ID NO: 1844 - DNA, 23 bp, Artificial Sequence
  Description of Artificial Sequence: Synthetic oligonucleotide
  Description of Combined DNA/RNA Molecule: Synthetic oligonucleotide
uccutacaaagagaacugguuag

SEQ ID NO: 1845 - DNA, 23 bp, Artificial Sequence
  Description of Artificial Sequence: Synthetic oligonucleotide
  Description of Combined DNA/RNA Molecule: Synthetic oligonucleotide
uucctuacaaagagaacugguua

SEQ ID NO: 1846 - DNA, 23 bp, Artificial Sequence
  Description of Artificial Sequence: Synthetic oligonucleotide
  Description of Combined DNA/RNA Molecule: Synthetic oligonucleotide
uguccutacaaagagaacugguu

SEQ ID NO: 1847 - DNA, 23 bp, Artificial Sequence
  Description of Artificial Sequence: Synthetic oligonucleotide
  Description of Combined DNA/RNA Molecule: Synthetic oligonucleotide
uaagtccuuacaaagagaacugg

SEQ ID NO: 1848 - DNA, 23 bp, Artificial Sequence
  Description of Artificial Sequence: Synthetic oligonucleotide
  Description of Combined DNA/RNA Molecule: Synthetic oligonucleotide
ucaaguccuuacaaagagaacug

SEQ ID NO: 1849 - DNA, 23 bp, Artificial Sequence
  Description of Artificial Sequence: Synthetic oligonucleotide
  Description of Combined DNA/RNA Molecule: Synthetic oligonucleotide
uacaagtccuuacaaagagaacu

SEQ ID NO: 1850 - DNA, 23 bp, Artificial Sequence
  Description of Artificial Sequence: Synthetic oligonucleotide
  Description of Combined DNA/RNA Molecule: Synthetic oligonucleotide
ugcacaagucctuacaaagagaa

SEQ ID NO: 1851 - DNA, 23 bp, Artificial Sequence
  Description of Artificial Sequence: Synthetic oligonucleotide
  Description of Combined DNA/RNA Molecule: Synthetic oligonucleotide
uuaatutcacccucaguauggag

SEQ ID NO: 1852 - DNA, 23 bp, Artificial Sequence
  Description of Artificial Sequence: Synthetic oligonucleotide
  Description of Combined DNA/RNA Molecule: Synthetic oligonucleotide
ucuuaatuucacccucaguaugg

SEQ ID NO: 1853 - DNA, 23 bp, Artificial Sequence
  Description of Artificial Sequence: Synthetic oligonucleotide
  Description of Combined DNA/RNA Molecule: Synthetic oligonucleotide
uccctuaauuucacccucaguau

SEQ ID NO: 1854 - DNA, 23 bp, Artificial Sequence
  Description of Artificial Sequence: Synthetic oligonucleotide
  Description of Combined DNA/RNA Molecule: Synthetic oligonucleotide
utcccutaauutcacccucagua

SEQ ID NO: 1855 - DNA, 23 bp, Artificial Sequence
  Description of Artificial Sequence: Synthetic oligonucleotide
  Description of Combined DNA/RNA Molecule: Synthetic oligonucleotide
uuuccctuaauuucacccucagu

SEQ ID NO: 1856 - DNA, 23 bp, Artificial Sequence
  Description of Artificial Sequence: Synthetic oligonucleotide
  Description of Combined DNA/RNA Molecule: Synthetic oligonucleotide
ucuucccuuaauuucacccucag

SEQ ID NO: 1857 - DNA, 23 bp, Artificial Sequence
  Description of Artificial Sequence: Synthetic oligonucleotide
  Description of Combined DNA/RNA Molecule: Synthetic oligonucleotide
uuggaacugagagugagaggcug

SEQ ID NO: 1858 - DNA, 23 bp, Artificial Sequence
  Description of Artificial Sequence: Synthetic oligonucleotide
  Description of Combined DNA/RNA Molecule: Synthetic oligonucleotide
uaguggaacugagagugagaggc

SEQ ID NO: 1859 - DNA, 23 bp, Artificial Sequence
  Description of Artificial Sequence: Synthetic oligonucleotide
  Description of Combined DNA/RNA Molecule: Synthetic oligonucleotide
uuuggatgaguggaacugagagu

SEQ ID NO: 1860 - DNA, 23 bp, Artificial Sequence
  Description of Artificial Sequence: Synthetic oligonucleotide
  Description of Combined DNA/RNA Molecule: Synthetic oligonucleotide
ucaacaaggcagaaacaccuagg

SEQ ID NO: 1861 - DNA, 23 bp, Artificial Sequence
  Description of Artificial Sequence: Synthetic oligonucleotide
  Description of Combined DNA/RNA Molecule: Synthetic oligonucleotide
utcaacaaggcagaaacaccuag

SEQ ID NO: 1862 - DNA, 23 bp, Artificial Sequence
  Description of Artificial Sequence: Synthetic oligonucleotide
  Description of Combined DNA/RNA Molecule: Synthetic oligonucleotide
uugucaacaaggcagaaacaccu

SEQ ID NO: 1863 - DNA, 23 bp, Artificial Sequence
  Description of Artificial Sequence: Synthetic oligonucleotide
  Description of Combined DNA/RNA Molecule: Synthetic oligonucleotide
uaugtcaacaaggcagaaacacc

SEQ ID NO: 1864 - DNA, 23 bp, Artificial Sequence
  Description of Artificial Sequence: Synthetic oligonucleotide
  Description of Combined DNA/RNA Molecule: Synthetic oligonucleotide
uagaacagacagcauggcuucca

SEQ ID NO: 1865 - DNA, 23 bp, Artificial Sequence
  Description of Artificial Sequence: Synthetic oligonucleotide
  Description of Combined DNA/RNA Molecule: Synthetic oligonucleotide
uuauguauauguucagcugcucc

SEQ ID NO: 1866 - DNA, 23 bp, Artificial Sequence
  Description of Artificial Sequence: Synthetic oligonucleotide
  Description of Combined DNA/RNA Molecule: Synthetic oligonucleotide
uauctatguauauguucagcugc

SEQ ID NO: 1867 - DNA, 23 bp, Artificial Sequence
  Description of Artificial Sequence: Synthetic oligonucleotide
  Description of Combined DNA/RNA Molecule: Synthetic oligonucleotide
ucaucuauguatauguucagcug

SEQ ID NO: 1868 - DNA, 23 bp, Artificial Sequence
  Description of Artificial Sequence: Synthetic oligonucleotide
  Description of Combined DNA/RNA Molecule: Synthetic oligonucleotide
uacatctauguauauguucagcu

SEQ ID NO: 1869 - DNA, 23 bp, Artificial Sequence
  Description of Artificial Sequence: Synthetic oligonucleotide
  Description of Combined DNA/RNA Molecule: Synthetic oligonucleotide
ucaacatcuauguauauguucag

SEQ ID NO: 1870 - DNA, 23 bp, Artificial Sequence
  Description of Artificial Sequence: Synthetic oligonucleotide
  Description of Combined DNA/RNA Molecule: Synthetic oligonucleotide
ugcaacaucuauguauauguuca

SEQ ID NO: 1871 - DNA, 23 bp, Artificial Sequence
  Description of Artificial Sequence: Synthetic oligonucleotide
  Description of Combined DNA/RNA Molecule: Synthetic oligonucleotide
uggcaacaucuauguauauguuc

SEQ ID NO: 1872 - DNA, 23 bp, Artificial Sequence
  Description of Artificial Sequence: Synthetic oligonucleotide
  Description of Combined DNA/RNA Molecule: Synthetic oligonucleotide
ugacaaauccaacuacaacucaa

SEQ ID NO: 1873 - DNA, 23 bp, Artificial Sequence
  Description of Artificial Sequence: Synthetic oligonucleotide
  Description of Combined DNA/RNA Molecule: Synthetic oligonucleotide
uagacaaauccaacuacaacuca

SEQ ID NO: 1874 - DNA, 23 bp, Artificial Sequence
  Description of Artificial Sequence: Synthetic oligonucleotide
  Description of Combined DNA/RNA Molecule: Synthetic oligonucleotide
ucagacaaauccaacuacaacuc

SEQ ID NO: 1875 - DNA, 23 bp, Artificial Sequence
  Description of Artificial Sequence: Synthetic oligonucleotide
  Description of Combined DNA/RNA Molecule: Synthetic oligonucleotide
uacagacaaauccaacuacaacu

SEQ ID NO: 1876 - DNA, 23 bp, Artificial Sequence
  Description of Artificial Sequence: Synthetic oligonucleotide
  Description of Combined DNA/RNA Molecule: Synthetic oligonucleotide
uaacagacaaauccaacuacaac

SEQ ID NO: 1877 - DNA, 23 bp, Artificial Sequence
  Description of Artificial Sequence: Synthetic oligonucleotide
  Description of Combined DNA/RNA Molecule: Synthetic oligonucleotide
uaaacagacaaauccaacuacaa

SEQ ID NO: 1878 - DNA, 23 bp, Artificial Sequence
  Description of Artificial Sequence: Synthetic oligonucleotide
  Description of Combined DNA/RNA Molecule: Synthetic oligonucleotide
uauaaacagacaaauccaacuac

SEQ ID NO: 1879 - DNA, 23 bp, Artificial Sequence
  Description of Artificial Sequence: Synthetic oligonucleotide
  Description of Combined DNA/RNA Molecule: Synthetic oligonucleotide
ugcataaacagacaaauccaacu

SEQ ID NO: 1880 - DNA, 23 bp, Artificial Sequence
  Description of Artificial Sequence: Synthetic oligonucleotide
  Description of Combined DNA/RNA Molecule: Synthetic oligonucleotide
uaagcataaacagacaaauccaa

SEQ ID NO: 1881 - DNA, 23 bp, Artificial Sequence
  Description of Artificial Sequence: Synthetic oligonucleotide
  Description of Combined DNA/RNA Molecule: Synthetic oligonucleotide
ucaagcauaaacagacaaaucca

SEQ ID NO: 1882 - DNA, 23 bp, Artificial Sequence
  Description of Artificial Sequence: Synthetic oligonucleotide
  Description of Combined DNA/RNA Molecule: Synthetic oligonucleotide
uccaagcauaaacagacaaaucc

SEQ ID NO: 1883 - DNA, 23 bp, Artificial Sequence
  Description of Artificial Sequence: Synthetic oligonucleotide
  Description of Combined DNA/RNA Molecule: Synthetic oligonucleotide
uuccaagcauaaacagacaaauc

SEQ ID NO: 1884 - DNA, 23 bp, Artificial Sequence
  Description of Artificial Sequence: Synthetic oligonucleotide
  Description of Combined DNA/RNA Molecule: Synthetic oligonucleotide
uauccaagcauaaacagacaaau

SEQ ID NO: 1885 - DNA, 23 bp, Artificial Sequence
  Description of Artificial Sequence: Synthetic oligonucleotide
  Description of Combined DNA/RNA Molecule: Synthetic oligonucleotide
uaauccaagcauaaacagacaaa

SEQ ID NO: 1886 - DNA, 23 bp, Artificial Sequence
  Description of Artificial Sequence: Synthetic oligonucleotide
  Description of Combined DNA/RNA Molecule: Synthetic oligonucleotide
uugaauccaagcauaaacagaca

SEQ ID NO: 1887 - DNA, 23 bp, Artificial Sequence
  Description of Artificial Sequence: Synthetic oligonucleotide
  Description of Combined DNA/RNA Molecule: Synthetic oligonucleotide
ugugaatccaagcauaaacagac

SEQ ID NO: 1888 - DNA, 23 bp, Artificial Sequence
  Description of Artificial Sequence: Synthetic oligonucleotide
  Description of Combined DNA/RNA Molecule: Synthetic oligonucleotide
ucuggugaauccaagcauaaaca

SEQ ID NO: 1889 - DNA, 23 bp, Artificial Sequence
  Description of Artificial Sequence: Synthetic oligonucleotide
  Description of Combined DNA/RNA Molecule: Synthetic oligonucleotide
uucatagucacucuggugaaucc

SEQ ID NO: 1890 - DNA, 23 bp, Artificial Sequence
  Description of Artificial Sequence: Synthetic oligonucleotide
  Description of Combined DNA/RNA Molecule: Synthetic oligonucleotide
uuaucatagucacucuggugaau

SEQ ID NO: 1891 - DNA, 23 bp, Artificial Sequence
  Description of Artificial Sequence: Synthetic oligonucleotide
  Description of Combined DNA/RNA Molecule: Synthetic oligonucleotide
ucuatcauagucacucuggugaa

SEQ ID NO: 1892 - DNA, 23 bp, Artificial Sequence
  Description of Artificial Sequence: Synthetic oligonucleotide
  Description of Combined DNA/RNA Molecule: Synthetic oligonucleotide
uacuaucauagucacucugguga

SEQ ID NO: 1893 - DNA, 23 bp, Artificial Sequence
  Description of Artificial Sequence: Synthetic oligonucleotide
  Description of Combined DNA/RNA Molecule: Synthetic oligonucleotide
ucactatcauagucacucuggug

SEQ ID NO: 1894 - RNA, 23 nt, Artificial Sequence
  Description of Artificial Sequence: Synthetic oligonucleotide
ucacgugacccaagcucgcaugg

SEQ ID NO: 1895 - RNA, 23 nt, Artificial Sequence
  Description of Artificial Sequence: Synthetic oligonucleotide
cacgugacccaagcucgcauggu

SEQ ID NO: 1896 - RNA, 23 nt, Artificial Sequence
  Description of Artificial Sequence: Synthetic oligonucleotide
acgugacccaagcucgcaugguc

SEQ ID NO: 1897 - RNA, 23 nt, Artificial Sequence
  Description of Artificial Sequence: Synthetic oligonucleotide
cgugacccaagcucgcaugguca

SEQ ID NO: 1898 - RNA, 23 nt, Artificial Sequence
  Description of Artificial Sequence: Synthetic oligonucleotide
gugacccaagcucgcauggucag

SEQ ID NO: 1899 - RNA, 23 nt, Artificial Sequence
  Description of Artificial Sequence: Synthetic oligonucleotide
ugacccaagcucgcauggucagu

SEQ ID NO: 1900 - RNA, 23 nt, Artificial Sequence
  Description of Artificial Sequence: Synthetic oligonucleotide
gacccaagcucgcauggucagua

SEQ ID NO: 1901 - RNA, 23 nt, Artificial Sequence
  Description of Artificial Sequence: Synthetic oligonucleotide
acccaagcucgcauggucaguaa

SEQ ID NO: 1902 - RNA, 23 nt, Artificial Sequence
  Description of Artificial Sequence: Synthetic oligonucleotide
cccaagcucgcauggucaguaaa

SEQ ID NO: 1903 - RNA, 23 nt, Artificial Sequence
  Description of Artificial Sequence: Synthetic oligonucleotide
gcagugugcaaauagucuacaaa

SEQ ID NO: 1904 - RNA, 23 nt, Artificial Sequence
  Description of Artificial Sequence: Synthetic oligonucleotide
ugugcaaauagucuacaaaccag

SEQ ID NO: 1905 - RNA, 23 nt, Artificial Sequence
  Description of Artificial Sequence: Synthetic oligonucleotide
aaauagucuacaaaccaguugac

SEQ ID NO: 1906 - RNA, 23 nt, Artificial Sequence
  Description of Artificial Sequence: Synthetic oligonucleotide
auagucuacaaaccaguugaccu

SEQ ID NO: 1907 - RNA, 23 nt, Artificial Sequence
  Description of Artificial Sequence: Synthetic oligonucleotide
uagucuacaaaccaguugaccug

SEQ ID NO: 1908 - RNA, 23 nt, Artificial Sequence
  Description of Artificial Sequence: Synthetic oligonucleotide
uuaggcaacauccaucauaaacc

SEQ ID NO: 1909 - RNA, 23 nt, Artificial Sequence
  Description of Artificial Sequence: Synthetic oligonucleotide
uaggcaacauccaucauaaacca

SEQ ID NO: 1910 - RNA, 23 nt, Artificial Sequence
  Description of Artificial Sequence: Synthetic oligonucleotide
aggcaacauccaucauaaaccag

SEQ ID NO: 1911 - RNA, 23 nt, Artificial Sequence
  Description of Artificial Sequence: Synthetic oligonucleotide
gcaacauccaucauaaaccagga

SEQ ID NO: 1912 - RNA, 23 nt, Artificial Sequence
  Description of Artificial Sequence: Synthetic oligonucleotide
aaaucugagaagcuugacuucaa

SEQ ID NO: 1913 - RNA, 23 nt, Artificial Sequence
  Description of Artificial Sequence: Synthetic oligonucleotide
ggcagcaucgacaugguagacuc

SEQ ID NO: 1914 - RNA, 23 nt, Artificial Sequence
  Description of Artificial Sequence: Synthetic oligonucleotide
aguggcagcaacaaaggauuuga

SEQ ID NO: 1915 - RNA, 23 nt, Artificial Sequence
  Description of Artificial Sequence: Synthetic oligonucleotide
guggcagcaacaaaggauuugaa

SEQ ID NO: 1916 - RNA, 23 nt, Artificial Sequence
  Description of Artificial Sequence: Synthetic oligonucleotide
gcagcaacaaaggauuugaaacu

SEQ ID NO: 1917 - RNA, 23 nt, Artificial Sequence
  Description of Artificial Sequence: Synthetic oligonucleotide
agcaacaaaggauuugaaacuug

SEQ ID NO: 1918 - RNA, 23 nt, Artificial Sequence
  Description of Artificial Sequence: Synthetic oligonucleotide
gcaacaaaggauuugaaacuugg

SEQ ID NO: 1919 - RNA, 23 nt, Artificial Sequence
  Description of Artificial Sequence: Synthetic oligonucleotide
caacaaaggauuugaaacuuggu

SEQ ID NO: 1920 - RNA, 23 nt, Artificial Sequence
  Description of Artificial Sequence: Synthetic oligonucleotide
aacaaaggauuugaaacuuggug

SEQ ID NO: 1921 - RNA, 23 nt, Artificial Sequence
  Description of Artificial Sequence: Synthetic oligonucleotide
acaaaggauuugaaacuuggugu

SEQ ID NO: 1922 - RNA, 23 nt, Artificial Sequence
  Description of Artificial Sequence: Synthetic oligonucleotide
caaaggauuugaaacuuggugug

SEQ ID NO: 1923 - RNA, 23 nt, Artificial Sequence
  Description of Artificial Sequence: Synthetic oligonucleotide
aggauuugaaacuugguguguuc

SEQ ID NO: 1924 - RNA, 23 nt, Artificial Sequence
  Description of Artificial Sequence: Synthetic oligonucleotide
caggcagacgaugucaaccuugu

SEQ ID NO: 1925 - RNA, 23 nt, Artificial Sequence
  Description of Artificial Sequence: Synthetic oligonucleotide
gcagacgaugucaaccuugugug

SEQ ID NO: 1926 - RNA, 23 nt, Artificial Sequence
  Description of Artificial Sequence: Synthetic oligonucleotide
acgaugucaaccuugugugagug

SEQ ID NO: 1927 - RNA, 23 nt, Artificial Sequence
  Description of Artificial Sequence: Synthetic oligonucleotide
cugcuccacagaaacccuguuuu

SEQ ID NO: 1928 - RNA, 23 nt, Artificial Sequence
  Description of Artificial Sequence: Synthetic oligonucleotide
uauugaguucugaagguuggaac

SEQ ID NO: 1929 - RNA, 23 nt, Artificial Sequence
  Description of Artificial Sequence: Synthetic oligonucleotide
auugaguucugaagguuggaacu

SEQ ID NO: 1930 - RNA, 23 nt, Artificial Sequence
  Description of Artificial Sequence: Synthetic oligonucleotide
uuuagggcuaaccaguucucuuu

SEQ ID NO: 1931 - RNA, 23 nt, Artificial Sequence
  Description of Artificial Sequence: Synthetic oligonucleotide
uagggcuaaccaguucucuuugu

SEQ ID NO: 1932 - RNA, 23 nt, Artificial Sequence
  Description of Artificial Sequence: Synthetic oligonucleotide
agggcuaaccaguucucuuugua

SEQ ID NO: 1933 - RNA, 23 nt, Artificial Sequence
  Description of Artificial Sequence: Synthetic oligonucleotide
cuaaccaguucucuuuguaagga

SEQ ID NO: 1934 - RNA, 23 nt, Artificial Sequence
  Description of Artificial Sequence: Synthetic oligonucleotide
uaaccaguucucuuuguaaggac

SEQ ID NO: 1935 - RNA, 23 nt, Artificial Sequence
  Description of Artificial Sequence: Synthetic oligonucleotide
aaccaguucucuuuguaaggacu

SEQ ID NO: 1936 - RNA, 23 nt, Artificial Sequence
  Description of Artificial Sequence: Synthetic oligonucleotide
ccaguucucuuuguaaggacuug

SEQ ID NO: 1937 - RNA, 23 nt, Artificial Sequence
  Description of Artificial Sequence: Synthetic oligonucleotide
caguucucuuuguaaggacuugu

SEQ ID NO: 1938 - RNA, 23 nt, Artificial Sequence
  Description of Artificial Sequence: Synthetic oligonucleotide
aguucucuuuguaaggacuugug

SEQ ID NO: 1939 - RNA, 23 nt, Artificial Sequence
  Description of Artificial Sequence: Synthetic oligonucleotide
uucucuuuguaaggacuugugcc

SEQ ID NO: 1940 - RNA, 23 nt, Artificial Sequence
  Description of Artificial Sequence: Synthetic oligonucleotide
cuccauacugagggugaaauuaa

SEQ ID NO: 1941 - RNA, 23 nt, Artificial Sequence
  Description of Artificial Sequence: Synthetic oligonucleotide
ccauacugagggugaaauuaagg

SEQ ID NO: 1942 - RNA, 23 nt, Artificial Sequence
  Description of Artificial Sequence: Synthetic oligonucleotide
auacugagggugaaauuaaggga

SEQ ID NO: 1943 - RNA, 23 nt, Artificial Sequence
  Description of Artificial Sequence: Synthetic oligonucleotide
uacugagggugaaauuaagggaa

SEQ ID NO: 1944 - RNA, 23 nt, Artificial Sequence
  Description of Artificial Sequence: Synthetic oligonucleotide
acugagggugaaauuaagggaag

SEQ ID NO: 1945 - RNA, 23 nt, Artificial Sequence
  Description of Artificial Sequence: Synthetic oligonucleotide
cugagggugaaauuaagggaagg

SEQ ID NO: 1946 - RNA, 23 nt, Artificial Sequence
  Description of Artificial Sequence: Synthetic oligonucleotide
cagccucucacucucaguuccac

SEQ ID NO: 1947 - RNA, 23 nt, Artificial Sequence
  Description of Artificial Sequence: Synthetic oligonucleotide
gccucucacucucaguuccacuc

SEQ ID NO: 1948 - RNA, 23 nt, Artificial Sequence
  Description of Artificial Sequence: Synthetic oligonucleotide
acucucaguuccacucauccaac

SEQ ID NO: 1949 - RNA, 23 nt, Artificial Sequence
  Description of Artificial Sequence: Synthetic oligonucleotide
ccuagguguuucugccuuguuga

SEQ ID NO: 1950 - RNA, 23 nt, Artificial Sequence
  Description of Artificial Sequence: Synthetic oligonucleotide
cuagguguuucugccuuguugac

SEQ ID NO: 1951 - RNA, 23 nt, Artificial Sequence
  Description of Artificial Sequence: Synthetic oligonucleotide
agguguuucugccuuguugacau

SEQ ID NO: 1952 - RNA, 23 nt, Artificial Sequence
  Description of Artificial Sequence: Synthetic oligonucleotide
gguguuucugccuuguugacaug

SEQ ID NO: 1953 - RNA, 23 nt, Artificial Sequence
  Description of Artificial Sequence: Synthetic oligonucleotide
uggaagccaugcugucuguucug

SEQ ID NO: 1954 - RNA, 23 nt, Artificial Sequence
  Description of Artificial Sequence: Synthetic oligonucleotide
ggagcagcugaacauauacauag

SEQ ID NO: 1955 - RNA, 23 nt, Artificial Sequence
  Description of Artificial Sequence: Synthetic oligonucleotide
gcagcugaacauauacauagaug

SEQ ID NO: 1956 - RNA, 23 nt, Artificial Sequence
  Description of Artificial Sequence: Synthetic oligonucleotide
cagcugaacauauacauagaugu

SEQ ID NO: 1957 - RNA, 23 nt, Artificial Sequence
  Description of Artificial Sequence: Synthetic oligonucleotide
agcugaacauauacauagauguu

SEQ ID NO: 1958 - RNA, 23 nt, Artificial Sequence
  Description of Artificial Sequence: Synthetic oligonucleotide
cugaacauauacauagauguugc

SEQ ID NO: 1959 - RNA, 23 nt, Artificial Sequence
  Description of Artificial Sequence: Synthetic oligonucleotide
ugaacauauacauagauguugcc

SEQ ID NO: 1960 - RNA, 23 nt, Artificial Sequence
  Description of Artificial Sequence: Synthetic oligonucleotide
gaacauauacauagauguugccc

SEQ ID NO: 1961 - RNA, 23 nt, Artificial Sequence
  Description of Artificial Sequence: Synthetic oligonucleotide
uugaguuguaguuggauuugucu

SEQ ID NO: 1962 - RNA, 23 nt, Artificial Sequence
  Description of Artificial Sequence: Synthetic oligonucleotide
ugaguuguaguuggauuugucug

SEQ ID NO: 1963 - RNA, 23 nt, Artificial Sequence
  Description of Artificial Sequence: Synthetic oligonucleotide
gaguuguaguuggauuugucugu

SEQ ID NO: 1964 - RNA, 23 nt, Artificial Sequence
  Description of Artificial Sequence: Synthetic oligonucleotide
aguuguaguuggauuugucuguu

SEQ ID NO: 1965 - RNA, 23 nt, Artificial Sequence
  Description of Artificial Sequence: Synthetic oligonucleotide
guuguaguuggauuugucuguuu

SEQ ID NO: 1966 - RNA, 23 nt, Artificial Sequence
  Description of Artificial Sequence: Synthetic oligonucleotide
uuguaguuggauuugucuguuua

SEQ ID NO: 1967 - RNA, 23 nt, Artificial Sequence
  Description of Artificial Sequence: Synthetic oligonucleotide
guaguuggauuugucuguuuaug

SEQ ID NO: 1968 - RNA, 23 nt, Artificial Sequence
  Description of Artificial Sequence: Synthetic oligonucleotide
aguuggauuugucuguuuaugcu

SEQ ID NO: 1969 - RNA, 23 nt, Artificial Sequence
  Description of Artificial Sequence: Synthetic oligonucleotide
uuggauuugucuguuuaugcuug

SEQ ID NO: 1970 - RNA, 23 nt, Artificial Sequence
  Description of Artificial Sequence: Synthetic oligonucleotide
uggauuugucuguuuaugcuugg

SEQ ID NO: 1971 - RNA, 23 nt, Artificial Sequence
  Description of Artificial Sequence: Synthetic oligonucleotide
ggauuugucuguuuaugcuugga

SEQ ID NO: 1972 - RNA, 23 nt, Artificial Sequence
  Description of Artificial Sequence: Synthetic oligonucleotide
gauuugucuguuuaugcuuggau

SEQ ID NO: 1973 - RNA, 23 nt, Artificial Sequence
  Description of Artificial Sequence: Synthetic oligonucleotide
auuugucuguuuaugcuuggauu

SEQ ID NO: 1974 - RNA, 23 nt, Artificial Sequence
  Description of Artificial Sequence: Synthetic oligonucleotide
uuugucuguuuaugcuuggauuc

SEQ ID NO: 1975 - RNA, 23 nt, Artificial Sequence
  Description of Artificial Sequence: Synthetic oligonucleotide
ugucuguuuaugcuuggauucac

SEQ ID NO: 1976 - RNA, 23 nt, Artificial Sequence
  Description of Artificial Sequence: Synthetic oligonucleotide
gucuguuuaugcuuggauucacc

SEQ ID NO: 1977 - RNA, 23 nt, Artificial Sequence
  Description of Artificial Sequence: Synthetic oligonucleotide
uguuuaugcuuggauucaccaga

SEQ ID NO: 1978 - RNA, 23 nt, Artificial Sequence
  Description of Artificial Sequence: Synthetic oligonucleotide
ggauucaccagagugacuaugau

SEQ ID NO: 1979 - RNA, 23 nt, Artificial Sequence
  Description of Artificial Sequence: Synthetic oligonucleotide
auucaccagagugacuaugauag

SEQ ID NO: 1980 - RNA, 23 nt, Artificial Sequence
  Description of Artificial Sequence: Synthetic oligonucleotide
uucaccagagugacuaugauagu

SEQ ID NO: 1981 - RNA, 23 nt, Artificial Sequence
  Description of Artificial Sequence: Synthetic oligonucleotide
ucaccagagugacuaugauagug

SEQ ID NO: 1982 - RNA, 23 nt, Artificial Sequence
  Description of Artificial Sequence: Synthetic oligonucleotide
caccagagugacuaugauaguga

SEQ ID NO: 1983 - RNA, 21 nt, Artificial Sequence
  Description of Artificial Sequence: Synthetic oligonucleotide
cagagugacuaugauagugaa

SEQ ID NO: 1984 - RNA, 21 nt, Artificial Sequence
  Description of Artificial Sequence: Synthetic oligonucleotide
ggacgcauguaucuugaaaua

SEQ ID NO: 1985 - RNA, 21 nt, Artificial Sequence
  Description of Artificial Sequence: Synthetic oligonucleotide
acgcauguaucuugaaaugca

SEQ ID NO: 1986 - RNA, 21 nt, Artificial Sequence
  Description of Artificial Sequence: Synthetic oligonucleotide
cgcauguaucuugaaaugcua

SEQ ID NO: 1987 - RNA, 21 nt, Artificial Sequence
  Description of Artificial Sequence: Synthetic oligonucleotide
gcauguaucuugaaaugcuua

SEQ ID NO: 1988 - RNA, 21 nt, Artificial Sequence
  Description of Artificial Sequence: Synthetic oligonucleotide
cauguaucuugaaaugcuuga

SEQ ID NO: 1989 - RNA, 21 nt, Artificial Sequence
  Description of Artificial Sequence: Synthetic oligonucleotide
uguaucuugaaaugcuuguaa

SEQ ID NO: 1990 - RNA, 21 nt, Artificial Sequence
  Description of Artificial Sequence: Synthetic oligonucleotide
guaucuugaaaugcuuguaaa

SEQ ID NO: 1991 - RNA, 21 nt, Artificial Sequence
  Description of Artificial Sequence: Synthetic oligonucleotide
cuugaaaugcuuguaaagaga

SEQ ID NO: 1992 - RNA, 21 nt, Artificial Sequence
  Description of Artificial Sequence: Synthetic oligonucleotide
uugaaaugcuuguaaagagga

SEQ ID NO: 1993 - RNA, 21 nt, Artificial Sequence
  Description of Artificial Sequence: Synthetic oligonucleotide
ugaaaugcuuguaaagaggua

SEQ ID NO: 1994 - RNA, 21 nt, Artificial Sequence
  Description of Artificial Sequence: Synthetic oligonucleotide
gaaaugcuuguaaagagguua

SEQ ID NO: 1995 - RNA, 21 nt, Artificial Sequence
  Description of Artificial Sequence: Synthetic oligonucleotide
aaaugcuuguaaagagguuua

SEQ ID NO: 1996 - RNA, 21 nt, Artificial Sequence
  Description of Artificial Sequence: Synthetic oligonucleotide
aaugcuuguaaagagguuuca

SEQ ID NO: 1997 - RNA, 21 nt, Artificial Sequence
  Description of Artificial Sequence: Synthetic oligonucleotide
augcuuguaaagagguuucua

SEQ ID NO: 1998 - RNA, 21 nt, Artificial Sequence
  Description of Artificial Sequence: Synthetic oligonucleotide
ugcuuguaaagagguuucuaa

SEQ ID NO: 1999 - RNA, 21 nt, Artificial Sequence
  Description of Artificial Sequence: Synthetic oligonucleotide
uuguaaagagguuucuaacca

SEQ ID NO: 2000 - RNA, 21 nt, Artificial Sequence
  Description of Artificial Sequence: Synthetic oligonucleotide
auugcugccuaaagaaacuca

SEQ ID NO: 2001 - RNA, 21 nt, Artificial Sequence
  Description of Artificial Sequence: Synthetic oligonucleotide
ugcugccuaaagaaacucaga

SEQ ID NO: 2002 - RNA, 21 nt, Artificial Sequence
  Description of Artificial Sequence: Synthetic oligonucleotide
ucugguuuggguacaguuaaa

SEQ ID NO: 2003 - RNA, 21 nt, Artificial Sequence
  Description of Artificial Sequence: Synthetic oligonucleotide
gguuuggguacaguuaaagga

SEQ ID NO: 2004 - RNA, 21 nt, Artificial Sequence
  Description of Artificial Sequence: Synthetic oligonucleotide
uuuggguacaguuaaaggcaa

SEQ ID NO: 2005 - RNA, 21 nt, Artificial Sequence
  Description of Artificial Sequence: Synthetic oligonucleotide
gauuugguggugguuagagaa

SEQ ID NO: 2006 - RNA, 21 nt, Artificial Sequence
  Description of Artificial Sequence: Synthetic oligonucleotide
ucauuacugccaacaguuuca

SEQ ID NO: 2007 - RNA, 21 nt, Artificial Sequence
  Description of Artificial Sequence: Synthetic oligonucleotide
cauuacugccaacaguuucga

SEQ ID NO: 2008 - RNA, 21 nt, Artificial Sequence
  Description of Artificial Sequence: Synthetic oligonucleotide
uacugccaacaguuucggcua

SEQ ID NO: 2009 - RNA, 21 nt, Artificial Sequence
  Description of Artificial Sequence: Synthetic oligonucleotide
guuccucuuccugaaguucua

SEQ ID NO: 2010 - RNA, 21 nt, Artificial Sequence
  Description of Artificial Sequence: Synthetic oligonucleotide
uuccucuuccugaaguucuua

SEQ ID NO: 2011 - RNA, 21 nt, Artificial Sequence
  Description of Artificial Sequence: Synthetic oligonucleotide
uccucuuccugaaguucuuga

SEQ ID NO: 2012 - RNA, 21 nt, Artificial Sequence
  Description of Artificial Sequence: Synthetic oligonucleotide
ccucuuccugaaguucuugua

SEQ ID NO: 2013 - RNA, 21 nt, Artificial Sequence
  Description of Artificial Sequence: Synthetic oligonucleotide
cucuuccugaaguucuuguga

SEQ ID NO: 2014 - RNA, 21 nt, Artificial Sequence
  Description of Artificial Sequence: Synthetic oligonucleotide
ucuuccugaaguucuugugca

SEQ ID NO: 2015 - RNA, 21 nt, Artificial Sequence
  Description of Artificial Sequence: Synthetic oligonucleotide
ccagccuaagaucaugguuua

SEQ ID NO: 2016 - RNA, 21 nt, Artificial Sequence
  Description of Artificial Sequence: Synthetic oligonucleotide
agccuaagaucaugguuuaga

SEQ ID NO: 2017 - RNA, 21 nt, Artificial Sequence
  Description of Artificial Sequence: Synthetic oligonucleotide
gccuaagaucaugguuuagga

SEQ ID NO: 2018 - RNA, 21 nt, Artificial Sequence
  Description of Artificial Sequence: Synthetic oligonucleotide
ucagugcuggcagauaaauua

SEQ ID NO: 2019 - RNA, 21 nt, Artificial Sequence
  Description of Artificial Sequence: Synthetic oligonucleotide
cacgcuggcuugugaucuuaa

SEQ ID NO: 2020 - RNA, 21 nt, Artificial Sequence
  Description of Artificial Sequence: Synthetic oligonucleotide
ugggcuagauaggauauacua

SEQ ID NO: 2021 - RNA, 21 nt, Artificial Sequence
  Description of Artificial Sequence: Synthetic oligonucleotide
gggcuagauaggauauacuga

SEQ ID NO: 2022 - RNA, 21 nt, Artificial Sequence
  Description of Artificial Sequence: Synthetic oligonucleotide
cuagauaggauauacuguaua

SEQ ID NO: 2023 - RNA, 21 nt, Artificial Sequence
  Description of Artificial Sequence: Synthetic oligonucleotide
uagauaggauauacuguauga

SEQ ID NO: 2024 - RNA, 21 nt, Artificial Sequence
  Description of Artificial Sequence: Synthetic oligonucleotide
acucacuuuaucaauaguuca

SEQ ID NO: 2025 - RNA, 21 nt, Artificial Sequence
  Description of Artificial Sequence: Synthetic oligonucleotide
cucacuuuaucaauaguucca

SEQ ID NO: 2026 - RNA, 21 nt, Artificial Sequence
  Description of Artificial Sequence: Synthetic oligonucleotide
ucacuuuaucaauaguuccaa

SEQ ID NO: 2027 - RNA, 21 nt, Artificial Sequence
  Description of Artificial Sequence: Synthetic oligonucleotide
cacuuuaucaauaguuccaua

SEQ ID NO: 2028 - RNA, 21 nt, Artificial Sequence
  Description of Artificial Sequence: Synthetic oligonucleotide
acuuuaucaauaguuccauua

SEQ ID NO: 2029 - RNA, 21 nt, Artificial Sequence
  Description of Artificial Sequence: Synthetic oligonucleotide
auaguuccauuuaaauugaca

SEQ ID NO: 2030 - RNA, 21 nt, Artificial Sequence
  Description of Artificial Sequence: Synthetic oligonucleotide
ggugagacuguauccuguuua

SEQ ID NO: 2031 - RNA, 21 nt, Artificial Sequence
  Description of Artificial Sequence: Synthetic oligonucleotide
gugagacuguauccuguuuga

SEQ ID NO: 2032 - RNA, 21 nt, Artificial Sequence
  Description of Artificial Sequence: Synthetic oligonucleotide
ugagacuguauccuguuugca

SEQ ID NO: 2033 - RNA, 21 nt, Artificial Sequence
  Description of Artificial Sequence: Synthetic oligonucleotide
gagacuguauccuguuugcua

SEQ ID NO: 2034 - RNA, 21 nt, Artificial Sequence
  Description of Artificial Sequence: Synthetic oligonucleotide
agacuguauccuguuugcuaa

SEQ ID NO: 2035 - RNA, 21 nt, Artificial Sequence
  Description of Artificial Sequence: Synthetic oligonucleotide
cuguauccuguuugcuauuga

SEQ ID NO: 2036 - RNA, 21 nt, Artificial Sequence
  Description of Artificial Sequence: Synthetic oligonucleotide
uguauccuguuugcuauugca

SEQ ID NO: 2037 - RNA, 21 nt, Artificial Sequence
  Description of Artificial Sequence: Synthetic oligonucleotide
guauccuguuugcuauugcua

SEQ ID NO: 2038 - RNA, 21 nt, Artificial Sequence
  Description of Artificial Sequence: Synthetic oligonucleotide
ugauuucaaccacauuugcua

SEQ ID NO: 2039 - RNA, 21 nt, Artificial Sequence
  Description of Artificial Sequence: Synthetic oligonucleotide
uauggacaucugguugcuuua

SEQ ID NO: 2040 - RNA, 21 nt, Artificial Sequence
  Description of Artificial Sequence: Synthetic oligonucleotide
auggacaucugguugcuuuga

SEQ ID NO: 2041 - RNA, 21 nt, Artificial Sequence
  Description of Artificial Sequence: Synthetic oligonucleotide
acuucugauuucucuucagca

SEQ ID NO: 2042 - RNA, 21 nt, Artificial Sequence
  Description of Artificial Sequence: Synthetic oligonucleotide
cuucugauuucucuucagcua

SEQ ID NO: 2043 - RNA, 21 nt, Artificial Sequence
  Description of Artificial Sequence: Synthetic oligonucleotide
cugauuucucuucagcuuuga

SEQ ID NO: 2044 - RNA, 21 nt, Artificial Sequence
  Description of Artificial Sequence: Synthetic oligonucleotide
ugauuucucuucagcuuugaa

SEQ ID NO: 2045 - RNA, 21 nt, Artificial Sequence
  Description of Artificial Sequence: Synthetic oligonucleotide
gauuucucuucagcuuugaaa

SEQ ID NO: 2046 - RNA, 21 nt, Artificial Sequence
  Description of Artificial Sequence: Synthetic oligonucleotide
acuugcaagucccaugauuua

SEQ ID NO: 2047 - RNA, 21 nt, Artificial Sequence
  Description of Artificial Sequence: Synthetic oligonucleotide
cuugcaagucccaugauuuca

SEQ ID NO: 2048 - RNA, 21 nt, Artificial Sequence
  Description of Artificial Sequence: Synthetic oligonucleotide
ugcaagucccaugauuucuua

SEQ ID NO: 2049 - RNA, 21 nt, Artificial Sequence
  Description of Artificial Sequence: Synthetic oligonucleotide
caagucccaugauuucuucga

SEQ ID NO: 2050 - RNA, 21 nt, Artificial Sequence
  Description of Artificial Sequence: Synthetic oligonucleotide
agucccaugauuucuucggua

SEQ ID NO: 2051 - RNA, 21 nt, Artificial Sequence
  Description of Artificial Sequence: Synthetic oligonucleotide
gucccaugauuucuucgguaa

SEQ ID NO: 2052 - RNA, 21 nt, Artificial Sequence
  Description of Artificial Sequence: Synthetic oligonucleotide
ucccaugauuucuucgguaaa

SEQ ID NO: 2053 - RNA, 21 nt, Artificial Sequence
  Description of Artificial Sequence: Synthetic oligonucleotide
cccaugauuucuucgguaaua

SEQ ID NO: 2054 - RNA, 21 nt, Artificial Sequence
  Description of Artificial Sequence: Synthetic oligonucleotide
ccaugauuucuucgguaauua

SEQ ID NO: 2055 - RNA, 21 nt, Artificial Sequence
  Description of Artificial Sequence: Synthetic oligonucleotide
agggacaugaaaucaucuuaa

SEQ ID NO: 2056 - RNA, 21 nt, Artificial Sequence
  Description of Artificial Sequence: Synthetic oligonucleotide
gggacaugaaaucaucuuaga

SEQ ID NO: 2057 - RNA, 21 nt, Artificial Sequence
  Description of Artificial Sequence: Synthetic oligonucleotide
ggacaugaaaucaucuuagca

SEQ ID NO: 2058 - RNA, 21 nt, Artificial Sequence
  Description of Artificial Sequence: Synthetic oligonucleotide
gacaugaaaucaucuuagcua

SEQ ID NO: 2059 - RNA, 21 nt, Artificial Sequence
  Description of Artificial Sequence: Synthetic oligonucleotide
acaugaaaucaucuuagcuua

SEQ ID NO: 2060 - RNA, 21 nt, Artificial Sequence
  Description of Artificial Sequence: Synthetic oligonucleotide
augaaaucaucuuagcuuaga

SEQ ID NO: 2061 - RNA, 21 nt, Artificial Sequence
  Description of Artificial Sequence: Synthetic oligonucleotide
gaaaucaucuuagcuuagcua

SEQ ID NO: 2062 - RNA, 21 nt, Artificial Sequence
  Description of Artificial Sequence: Synthetic oligonucleotide
aaaucaucuuagcuuagcuua

SEQ ID NO: 2063 - RNA, 21 nt, Artificial Sequence
  Description of Artificial Sequence: Synthetic oligonucleotide
gugaaugucuauauaguguaa

SEQ ID NO: 2064 - RNA, 21 nt, Artificial Sequence
  Description of Artificial Sequence: Synthetic oligonucleotide
aaugucuauauaguguauuga

SEQ ID NO: 2065 - RNA, 21 nt, Artificial Sequence
  Description of Artificial Sequence: Synthetic oligonucleotide
ugucuauauaguguauuguga

SEQ ID NO: 2066 - RNA, 21 nt, Artificial Sequence
  Description of Artificial Sequence: Synthetic oligonucleotide
gucuauauaguguauugugua

SEQ ID NO: 2067 - RNA, 21 nt, Artificial Sequence
  Description of Artificial Sequence: Synthetic oligonucleotide
ucuauauaguguauuguguga

SEQ ID NO: 2068 - RNA, 21 nt, Artificial Sequence
  Description of Artificial Sequence: Synthetic oligonucleotide
uauauaguguauuguguguua

SEQ ID NO: 2069 - RNA, 21 nt, Artificial Sequence
  Description of Artificial Sequence: Synthetic oligonucleotide
auauaguguauuguguguuua

SEQ ID NO: 2070 - RNA, 21 nt, Artificial Sequence
  Description of Artificial Sequence: Synthetic oligonucleotide
caaaugauuuacacugacuga

SEQ ID NO: 2071 - RNA, 21 nt, Artificial Sequence
  Description of Artificial Sequence: Synthetic oligonucleotide
aaugauuuacacugacuguua

SEQ ID NO: 2072 - RNA, 21 nt, Artificial Sequence
  Description of Artificial Sequence: Synthetic oligonucleotide
gaaauaaaguuauuacucuga

SEQ ID NO: 2073 - DNA, 23 bp, Artificial Sequence
  Description of Artificial Sequence: Synthetic oligonucleotide
  Description of Combined DNA/RNA Molecule: Synthetic oligonucleotide
utcacuaucauagucacucuggu

SEQ ID NO: 2074 - DNA, 23 bp, Artificial Sequence
  Description of Artificial Sequence: Synthetic oligonucleotide
  Description of Combined DNA/RNA Molecule: Synthetic oligonucleotide
uauutcaagauacaugcguccuu

SEQ ID NO: 2075 - DNA, 23 bp, Artificial Sequence
  Description of Artificial Sequence: Synthetic oligonucleotide
  Description of Combined DNA/RNA Molecule: Synthetic oligonucleotide
ugcatutcaagauacaugcgucc

SEQ ID NO: 2076 - DNA, 23 bp, Artificial Sequence
  Description of Artificial Sequence: Synthetic oligonucleotide
  Description of Combined DNA/RNA Molecule: Synthetic oligonucleotide
uagcautucaagauacaugcguc

SEQ ID NO: 2077 - DNA, 23 bp, Artificial Sequence
  Description of Artificial Sequence: Synthetic oligonucleotide
  Description of Combined DNA/RNA Molecule: Synthetic oligonucleotide
uaagcatuucaagauacaugcgu

SEQ ID NO: 2078 - RNA, 23 nt, Artificial Sequence
  Description of Artificial Sequence: Synthetic oligonucleotide
ucaagcauuucaagauacaugcg

SEQ ID NO: 2079 - RNA, 23 nt, Artificial Sequence
  Description of Artificial Sequence: Synthetic oligonucleotide
uuacaagcauuucaagauacaug

SEQ ID NO: 2080 - RNA, 23 nt, Artificial Sequence
  Description of Artificial Sequence: Synthetic oligonucleotide
uuuacaagcauuucaagauacau

SEQ ID NO: 2081 - DNA, 23 bp, Artificial Sequence
  Description of Artificial Sequence: Synthetic oligonucleotide
  Description of Combined DNA/RNA Molecule: Synthetic oligonucleotide
ucuctutacaagcauuucaagau

SEQ ID NO: 2082 - DNA, 23 bp, Artificial Sequence
  Description of Artificial Sequence: Synthetic oligonucleotide
  Description of Combined DNA/RNA Molecule: Synthetic oligonucleotide
uccucutuacaagcauuucaaga

SEQ ID NO: 2083 - DNA, 23 bp, Artificial Sequence
  Description of Artificial Sequence: Synthetic oligonucleotide
  Description of Combined DNA/RNA Molecule: Synthetic oligonucleotide
uacctctuuacaagcauuucaag

SEQ ID NO: 2084 - RNA, 23 nt, Artificial Sequence
  Description of Artificial Sequence: Synthetic oligonucleotide
uaaccucuuuacaagcauuucaa

SEQ ID NO: 2085 - DNA, 23 bp, Artificial Sequence
  Description of Artificial Sequence: Synthetic oligonucleotide
  Description of Combined DNA/RNA Molecule: Synthetic oligonucleotide
uaaacctcuuuacaagcauuuca

SEQ ID NO: 2086 - RNA, 23 nt, Artificial Sequence
  Description of Artificial Sequence: Synthetic oligonucleotide
ugaaaccucuuuacaagcauuuc

SEQ ID NO: 2087 - DNA, 23 bp, Artificial Sequence
  Description of Artificial Sequence: Synthetic oligonucleotide
  Description of Combined DNA/RNA Molecule: Synthetic oligonucleotide
uagaaaccucutuacaagcauuu

SEQ ID NO: 2088 - DNA, 23 bp, Artificial Sequence
  Description of Artificial Sequence: Synthetic oligonucleotide
  Description of Combined DNA/RNA Molecule: Synthetic oligonucleotide
utagaaaccuctuuacaagcauu

SEQ ID NO: 2089 - DNA, 23 bp, Artificial Sequence
  Description of Artificial Sequence: Synthetic oligonucleotide
  Description of Combined DNA/RNA Molecule: Synthetic oligonucleotide
uggutagaaaccucuuuacaagc

SEQ ID NO: 2090 - DNA, 23 bp, Artificial Sequence
  Description of Artificial Sequence: Synthetic oligonucleotide
  Description of Combined DNA/RNA Molecule: Synthetic oligonucleotide
ugagtutcuuuaggcagcaaugu

SEQ ID NO: 2091 - DNA, 23 bp, Artificial Sequence
  Description of Artificial Sequence: Synthetic oligonucleotide
  Description of Combined DNA/RNA Molecule: Synthetic oligonucleotide
ucugagtuucuuuaggcagcaau

SEQ ID NO: 2092 - DNA, 23 bp, Artificial Sequence
  Description of Artificial Sequence: Synthetic oligonucleotide
  Description of Combined DNA/RNA Molecule: Synthetic oligonucleotide
uuuaactguacccaaaccagaag

SEQ ID NO: 2093 - DNA, 23 bp, Artificial Sequence
  Description of Artificial Sequence: Synthetic oligonucleotide
  Description of Combined DNA/RNA Molecule: Synthetic oligonucleotide
uccutuaacugtacccaaaccag

SEQ ID NO: 2094 - DNA, 23 bp, Artificial Sequence
  Description of Artificial Sequence: Synthetic oligonucleotide
  Description of Combined DNA/RNA Molecule: Synthetic oligonucleotide
uugccutuaacuguacccaaacc

SEQ ID NO: 2095 - DNA, 23 bp, Artificial Sequence
  Description of Artificial Sequence: Synthetic oligonucleotide
  Description of Combined DNA/RNA Molecule: Synthetic oligonucleotide
utcucuaaccaccaccaaaucua

SEQ ID NO: 2096 - DNA, 23 bp, Artificial Sequence
  Description of Artificial Sequence: Synthetic oligonucleotide
  Description of Combined DNA/RNA Molecule: Synthetic oligonucleotide
ugaaactguuggcaguaaugagg

SEQ ID NO: 2097 - RNA, 23 nt, Artificial Sequence
  Description of Artificial Sequence: Synthetic oligonucleotide
ucgaaacuguuggcaguaaugag

SEQ ID NO: 2098 - RNA, 23 nt, Artificial Sequence
  Description of Artificial Sequence: Synthetic oligonucleotide
uagccgaaacuguuggcaguaau

SEQ ID NO: 2099 - DNA, 23 bp, Artificial Sequence
  Description of Artificial Sequence: Synthetic oligonucleotide
  Description of Combined DNA/RNA Molecule: Synthetic oligonucleotide
uagaactucaggaagaggaaccg

SEQ ID NO: 2100 - RNA, 23 nt, Artificial Sequence
  Description of Artificial Sequence: Synthetic oligonucleotide
uaagaacuucaggaagaggaacc

SEQ ID NO: 2101 - RNA, 23 nt, Artificial Sequence
  Description of Artificial Sequence: Synthetic oligonucleotide
ucaagaacuucaggaagaggaac

SEQ ID NO: 2102 - RNA, 23 nt, Artificial Sequence
  Description of Artificial Sequence: Synthetic oligonucleotide
uacaagaacuucaggaagaggaa

SEQ ID NO: 2103 - DNA, 23 bp, Artificial Sequence
  Description of Artificial Sequence: Synthetic oligonucleotide
  Description of Combined DNA/RNA Molecule: Synthetic oligonucleotide
ucacaagaacutcaggaagagga

SEQ ID NO: 2104 - DNA, 23 bp, Artificial Sequence
  Description of Artificial Sequence: Synthetic oligonucleotide
  Description of Combined DNA/RNA Molecule: Synthetic oligonucleotide
ugcacaagaactucaggaagagg

SEQ ID NO: 2105 - RNA, 23 nt, Artificial Sequence
  Description of Artificial Sequence: Synthetic oligonucleotide
uaaaccaugaucuuaggcuggcc

SEQ ID NO: 2106 - RNA, 23 nt, Artificial Sequence
  Description of Artificial Sequence: Synthetic oligonucleotide
ucuaaaccaugaucuuaggcugg

SEQ ID NO: 2107 - RNA, 23 nt, Artificial Sequence
  Description of Artificial Sequence: Synthetic oligonucleotide
uccuaaaccaugaucuuaggcug

SEQ ID NO: 2108 - DNA, 23 bp, Artificial Sequence
  Description of Artificial Sequence: Synthetic oligonucleotide
  Description of Combined DNA/RNA Molecule: Synthetic oligonucleotide
uaautuaucugccagcacugauc

SEQ ID NO: 2109 - DNA, 23 bp, Artificial Sequence
  Description of Artificial Sequence: Synthetic oligonucleotide
  Description of Combined DNA/RNA Molecule: Synthetic oligonucleotide
uuaagatcacaagccagcgugcc

SEQ ID NO: 2110 - RNA, 23 nt, Artificial Sequence
  Description of Artificial Sequence: Synthetic oligonucleotide
uaguauauccuaucuagcccacc

SEQ ID NO: 2111 - DNA, 23 bp, Artificial Sequence
  Description of Artificial Sequence: Synthetic oligonucleotide
  Description of Combined DNA/RNA Molecule: Synthetic oligonucleotide
ucagtataucctaucuagcccac

SEQ ID NO: 2112 - RNA, 23 nt, Artificial Sequence
  Description of Artificial Sequence: Synthetic oligonucleotide
uauacaguauauccuaucuagcc

SEQ ID NO: 2113 - RNA, 23 nt, Artificial Sequence
  Description of Artificial Sequence: Synthetic oligonucleotide
ucauacaguauauccuaucuagc

SEQ ID NO: 2114 - DNA, 23 bp, Artificial Sequence
  Description of Artificial Sequence: Synthetic oligonucleotide
  Description of Combined DNA/RNA Molecule: Synthetic oligonucleotide
ugaacuauugataaagugaguca

SEQ ID NO: 2115 - DNA, 23 bp, Artificial Sequence
  Description of Artificial Sequence: Synthetic oligonucleotide
  Description of Combined DNA/RNA Molecule: Synthetic oligonucleotide
uggaactauugauaaagugaguc

SEQ ID NO: 2116 - RNA, 23 nt, Artificial Sequence
  Description of Artificial Sequence: Synthetic oligonucleotide
uuggaacuauugauaaagugagu

SEQ ID NO: 2117 - RNA, 23 nt, Artificial Sequence
  Description of Artificial Sequence: Synthetic oligonucleotide
uauggaacuauugauaaagugag

SEQ ID NO: 2118 - RNA, 23 nt, Artificial Sequence
  Description of Artificial Sequence: Synthetic oligonucleotide
uaauggaacuauugauaaaguga

SEQ ID NO: 2119 - DNA, 23 bp, Artificial Sequence
  Description of Artificial Sequence: Synthetic oligonucleotide
  Description of Combined DNA/RNA Molecule: Synthetic oligonucleotide
ugucaatuuaaauggaacuauug

SEQ ID NO: 2120 - RNA, 23 nt, Artificial Sequence
  Description of Artificial Sequence: Synthetic oligonucleotide
uaaacaggauacagucucaccac

SEQ ID NO: 2121 - RNA, 23 nt, Artificial Sequence
  Description of Artificial Sequence: Synthetic oligonucleotide
ucaaacaggauacagucucacca

SEQ ID NO: 2122 - DNA, 23 bp, Artificial Sequence
  Description of Artificial Sequence: Synthetic oligonucleotide
  Description of Combined DNA/RNA Molecule: Synthetic oligonucleotide
ugcaaacaggatacagucucacc

SEQ ID NO: 2123 - RNA, 23 nt, Artificial Sequence
  Description of Artificial Sequence: Synthetic oligonucleotide
uagcaaacaggauacagucucac

SEQ ID NO: 2124 - DNA, 23 bp, Artificial Sequence
  Description of Artificial Sequence: Synthetic oligonucleotide
  Description of Combined DNA/RNA Molecule: Synthetic oligonucleotide
utagcaaacaggauacagucuca

SEQ ID NO: 2125 - DNA, 23 bp, Artificial Sequence
  Description of Artificial Sequence: Synthetic oligonucleotide
  Description of Combined DNA/RNA Molecule: Synthetic oligonucleotide
ucaatagcaaacaggauacaguc

SEQ ID NO: 2126 - RNA, 23 nt, Artificial Sequence
  Description of Artificial Sequence: Synthetic oligonucleotide
ugcaauagcaaacaggauacagu

SEQ ID NO: 2127 - DNA, 23 bp, Artificial Sequence
  Description of Artificial Sequence: Synthetic oligonucleotide
  Description of Combined DNA/RNA Molecule: Synthetic oligonucleotide
uagcaatagcaaacaggauacag

SEQ ID NO: 2128 - RNA, 23 nt, Artificial Sequence
  Description of Artificial Sequence: Synthetic oligonucleotide
uagcaaaugugguugaaaucaug

SEQ ID NO: 2129 - RNA, 23 nt, Artificial Sequence
  Description of Artificial Sequence: Synthetic oligonucleotide
uaaagcaaccagauguccauauu

SEQ ID NO: 2130 - RNA, 23 nt, Artificial Sequence
  Description of Artificial Sequence: Synthetic oligonucleotide
ucaaagcaaccagauguccauau

SEQ ID NO: 2131 - RNA, 23 nt, Artificial Sequence
  Description of Artificial Sequence: Synthetic oligonucleotide
ugcugaagagaaaucagaaguuu

SEQ ID NO: 2132 - DNA, 23 bp, Artificial Sequence
  Description of Artificial Sequence: Synthetic oligonucleotide
  Description of Combined DNA/RNA Molecule: Synthetic oligonucleotide
uagctgaagagaaaucagaaguu

SEQ ID NO: 2133 - RNA, 23 nt, Artificial Sequence
  Description of Artificial Sequence: Synthetic oligonucleotide
ucaaagcugaagagaaaucagaa

SEQ ID NO: 2134 - RNA, 23 nt, Artificial Sequence
  Description of Artificial Sequence: Synthetic oligonucleotide
uucaaagcugaagagaaaucaga

SEQ ID NO: 2135 - DNA, 23 bp, Artificial Sequence
  Description of Artificial Sequence: Synthetic oligonucleotide
  Description of Combined DNA/RNA Molecule: Synthetic oligonucleotide
utucaaagcugaagagaaaucag

SEQ ID NO: 2136 - DNA, 23 bp, Artificial Sequence
  Description of Artificial Sequence: Synthetic oligonucleotide
  Description of Combined DNA/RNA Molecule: Synthetic oligonucleotide
uaaatcaugggacuugcaagugc

SEQ ID NO: 2137 - RNA, 23 nt, Artificial Sequence
  Description of Artificial Sequence: Synthetic oligonucleotide
ugaaaucaugggacuugcaagug

SEQ ID NO: 2138 - RNA, 23 nt, Artificial Sequence
  Description of Artificial Sequence: Synthetic oligonucleotide
uaagaaaucaugggacuugcaag

SEQ ID NO: 2139 - RNA, 23 nt, Artificial Sequence
  Description of Artificial Sequence: Synthetic oligonucleotide
ucgaagaaaucaugggacuugca

SEQ ID NO: 2140 - DNA, 23 bp, Artificial Sequence
  Description of Artificial Sequence: Synthetic oligonucleotide
  Description of Combined DNA/RNA Molecule: Synthetic oligonucleotide
uaccgaagaaatcaugggacuug

SEQ ID NO: 2141 - DNA, 23 bp, Artificial Sequence
  Description of Artificial Sequence: Synthetic oligonucleotide
  Description of Combined DNA/RNA Molecule: Synthetic oligonucleotide
utaccgaagaaaucaugggacuu

SEQ ID NO: 2142 - DNA, 23 bp, Artificial Sequence
  Description of Artificial Sequence: Synthetic oligonucleotide
  Description of Combined DNA/RNA Molecule: Synthetic oligonucleotide
utuaccgaagaaaucaugggacu

SEQ ID NO: 2143 - RNA, 23 nt, Artificial Sequence
  Description of Artificial Sequence: Synthetic oligonucleotide
uauuaccgaagaaaucaugggac

SEQ ID NO: 2144 - DNA, 23 bp, Artificial Sequence
  Description of Artificial Sequence: Synthetic oligonucleotide
  Description of Combined DNA/RNA Molecule: Synthetic oligonucleotide
uaautaccgaagaaaucauggga

SEQ ID NO: 2145 - DNA, 23 bp, Artificial Sequence
  Description of Artificial Sequence: Synthetic oligonucleotide
  Description of Combined DNA/RNA Molecule: Synthetic oligonucleotide
uuaagatgauuucaugucccucc

SEQ ID NO: 2146 - DNA, 23 bp, Artificial Sequence
  Description of Artificial Sequence: Synthetic oligonucleotide
  Description of Combined DNA/RNA Molecule: Synthetic oligonucleotide
ucuaagaugautucaugucccuc

SEQ ID NO: 2147 - DNA, 23 bp, Artificial Sequence
  Description of Artificial Sequence: Synthetic oligonucleotide
  Description of Combined DNA/RNA Molecule: Synthetic oligonucleotide
ugcuaagaugatuucaugucccu

SEQ ID NO: 2148 - DNA, 23 bp, Artificial Sequence
  Description of Artificial Sequence: Synthetic oligonucleotide
  Description of Combined DNA/RNA Molecule: Synthetic oligonucleotide
uagctaagaugauuucauguccc

SEQ ID NO: 2149 - RNA, 23 nt, Artificial Sequence
  Description of Artificial Sequence: Synthetic oligonucleotide
uaagcuaagaugauuucaugucc

SEQ ID NO: 2150 - RNA, 23 nt, Artificial Sequence
  Description of Artificial Sequence: Synthetic oligonucleotide
ucuaagcuaagaugauuucaugu

SEQ ID NO: 2151 - DNA, 23 bp, Artificial Sequence
  Description of Artificial Sequence: Synthetic oligonucleotide
  Description of Combined DNA/RNA Molecule: Synthetic oligonucleotide
uagctaagcuaagaugauuucau

SEQ ID NO: 2152 - RNA, 23 nt, Artificial Sequence
  Description of Artificial Sequence: Synthetic oligonucleotide
uaagcuaagcuaagaugauuuca

SEQ ID NO: 2153 - DNA, 23 bp, Artificial Sequence
  Description of Artificial Sequence: Synthetic oligonucleotide
  Description of Combined DNA/RNA Molecule: Synthetic oligonucleotide
uuacactauauagacauucacag

SEQ ID NO: 2154 - DNA, 23 bp, Artificial Sequence
  Description of Artificial Sequence: Synthetic oligonucleotide
  Description of Combined DNA/RNA Molecule: Synthetic oligonucleotide
ucaatacacuatauagacauuca

SEQ ID NO: 2155 - DNA, 23 bp, Artificial Sequence
  Description of Artificial Sequence: Synthetic oligonucleotide
  Description of Combined DNA/RNA Molecule: Synthetic oligonucleotide
ucacaatacactauauagacauu

SEQ ID NO: 2156 - RNA, 23 nt, Artificial Sequence
  Description of Artificial Sequence: Synthetic oligonucleotide
uacacaauacacuauauagacau

SEQ ID NO: 2157 - RNA, 23 nt, Artificial Sequence
  Description of Artificial Sequence: Synthetic oligonucleotide
ucacacaauacacuauauagaca

SEQ ID NO: 2158 - RNA, 23 nt, Artificial Sequence
  Description of Artificial Sequence: Synthetic oligonucleotide
uaacacacaauacacuauauaga

SEQ ID NO: 2159 - RNA, 23 nt, Artificial Sequence
  Description of Artificial Sequence: Synthetic oligonucleotide
uaaacacacaauacacuauauag

SEQ ID NO: 2160 - DNA, 23 bp, Artificial Sequence
  Description of Artificial Sequence: Synthetic oligonucleotide
  Description of Combined DNA/RNA Molecule: Synthetic oligonucleotide
ucagtcaguguaaaucauuuguu

SEQ ID NO: 2161 - DNA, 23 bp, Artificial Sequence
  Description of Artificial Sequence: Synthetic oligonucleotide
  Description of Combined DNA/RNA Molecule: Synthetic oligonucleotide
uaacagtcaguguaaaucauuug

SEQ ID NO: 2162 - DNA, 23 bp, Artificial Sequence
  Description of Artificial Sequence: Synthetic oligonucleotide
  Description of Combined DNA/RNA Molecule: Synthetic oligonucleotide
ucagagtaauaacuuuauuucca

SEQ ID NO: 2163 - RNA, 21 nt, Artificial Sequence
  Description of Artificial Sequence: Synthetic oligonucleotide
cagagugacuaugauagugaa

SEQ ID NO: 2164 - RNA, 21 nt, Artificial Sequence
  Description of Artificial Sequence: Synthetic oligonucleotide
ggacgcauguaucuugaaaua

SEQ ID NO: 2165 - RNA, 21 nt, Artificial Sequence
  Description of Artificial Sequence: Synthetic oligonucleotide
acgcauguaucuugaaaugca

SEQ ID NO: 2166 - RNA, 21 nt, Artificial Sequence
  Description of Artificial Sequence: Synthetic oligonucleotide
cgcauguaucuugaaaugcua

SEQ ID NO: 2167 - RNA, 21 nt, Artificial Sequence
  Description of Artificial Sequence: Synthetic oligonucleotide
gcauguaucuugaaaugcuua

SEQ ID NO: 2168 - RNA, 21 nt, Artificial Sequence
  Description of Artificial Sequence: Synthetic oligonucleotide
cauguaucuugaaaugcuuga

SEQ ID NO: 2169 - RNA, 21 nt, Artificial Sequence
  Description of Artificial Sequence: Synthetic oligonucleotide
uguaucuugaaaugcuuguaa

SEQ ID NO: 2170 - RNA, 21 nt, Artificial Sequence
  Description of Artificial Sequence: Synthetic oligonucleotide
guaucuugaaaugcuuguaaa

SEQ ID NO: 2171 - RNA, 21 nt, Artificial Sequence
  Description of Artificial Sequence: Synthetic oligonucleotide
cuugaaaugcuuguaaagaga

SEQ ID NO: 2172 - RNA, 21 nt, Artificial Sequence
  Description of Artificial Sequence: Synthetic oligonucleotide
uugaaaugcuuguaaagagga

SEQ ID NO: 2173 - RNA, 21 nt, Artificial Sequence
  Description of Artificial Sequence: Synthetic oligonucleotide
ugaaaugcuuguaaagaggua

SEQ ID NO: 2174 - RNA, 21 nt, Artificial Sequence
  Description of Artificial Sequence: Synthetic oligonucleotide
gaaaugcuuguaaagagguua

SEQ ID NO: 2175 - RNA, 21 nt, Artificial Sequence
  Description of Artificial Sequence: Synthetic oligonucleotide
aaaugcuuguaaagagguuua

SEQ ID NO: 2176 - RNA, 21 nt, Artificial Sequence
  Description of Artificial Sequence: Synthetic oligonucleotide
aaugcuuguaaagagguuuca

SEQ ID NO: 2177 - RNA, 21 nt, Artificial Sequence
  Description of Artificial Sequence: Synthetic oligonucleotide
augcuuguaaagagguuucua

SEQ ID NO: 2178 - RNA, 21 nt, Artificial Sequence
  Description of Artificial Sequence: Synthetic oligonucleotide
ugcuuguaaagagguuucuaa

SEQ ID NO: 2179 - RNA, 21 nt, Artificial Sequence
  Description of Artificial Sequence: Synthetic oligonucleotide
uuguaaagagguuucuaacca

SEQ ID NO: 2180 - RNA, 21 nt, Artificial Sequence
  Description of Artificial Sequence: Synthetic oligonucleotide
auugcugccuaaagaaacuca

SEQ ID NO: 2181 - RNA, 21 nt, Artificial Sequence
  Description of Artificial Sequence: Synthetic oligonucleotide
ugcugccuaaagaaacucaga

SEQ ID NO: 2182 - RNA, 21 nt, Artificial Sequence
  Description of Artificial Sequence: Synthetic oligonucleotide
ucugguuuggguacaguuaaa

SEQ ID NO: 2183 - RNA, 21 nt, Artificial Sequence
  Description of Artificial Sequence: Synthetic oligonucleotide
gguuuggguacaguuaaagga

SEQ ID NO: 2184 - RNA, 21 nt, Artificial Sequence
  Description of Artificial Sequence: Synthetic oligonucleotide
uuuggguacaguuaaaggcaa

SEQ ID NO: 2185 - RNA, 21 nt, Artificial Sequence
  Description of Artificial Sequence: Synthetic oligonucleotide
gauuugguggugguuagagaa

SEQ ID NO: 2186 - RNA, 21 nt, Artificial Sequence
  Description of Artificial Sequence: Synthetic oligonucleotide
ucauuacugccaacaguuuca

SEQ ID NO: 2187 - RNA, 21 nt, Artificial Sequence
  Description of Artificial Sequence: Synthetic oligonucleotide
cauuacugccaacaguuucga

SEQ ID NO: 2188 - RNA, 21 nt, Artificial Sequence
  Description of Artificial Sequence: Synthetic oligonucleotide
uacugccaacaguuucggcua

SEQ ID NO: 2189 - RNA, 21 nt, Artificial Sequence
  Description of Artificial Sequence: Synthetic oligonucleotide
guuccucuuccugaaguucua

SEQ ID NO: 2190 - RNA, 21 nt, Artificial Sequence
  Description of Artificial Sequence: Synthetic oligonucleotide
uuccucuuccugaaguucuua

SEQ ID NO: 2191 - RNA, 21 nt, Artificial Sequence
  Description of Artificial Sequence: Synthetic oligonucleotide
uccucuuccugaaguucuuga

SEQ ID NO: 2192 - RNA, 21 nt, Artificial Sequence
  Description of Artificial Sequence: Synthetic oligonucleotide
ccucuuccugaaguucuugua

SEQ ID NO: 2193 - RNA, 21 nt, Artificial Sequence
  Description of Artificial Sequence: Synthetic oligonucleotide
cucuuccugaaguucuuguga

SEQ ID NO: 2194 - RNA, 21 nt, Artificial Sequence
  Description of Artificial Sequence: Synthetic oligonucleotide
ucuuccugaaguucuugugca

SEQ ID NO: 2195 - RNA, 21 nt, Artificial Sequence
  Description of Artificial Sequence: Synthetic oligonucleotide
ccagccuaagaucaugguuua

SEQ ID NO: 2196 - RNA, 21 nt, Artificial Sequence
  Description of Artificial Sequence: Synthetic oligonucleotide
agccuaagaucaugguuuaga

SEQ ID NO: 2197 - RNA, 21 nt, Artificial Sequence
  Description of Artificial Sequence: Synthetic oligonucleotide
gccuaagaucaugguuuagga

SEQ ID NO: 2198 - RNA, 21 nt, Artificial Sequence
  Description of Artificial Sequence: Synthetic oligonucleotide
ucagugcuggcagauaaauua

SEQ ID NO: 2199 - RNA, 21 nt, Artificial Sequence
  Description of Artificial Sequence: Synthetic oligonucleotide
cacgcuggcuugugaucuuaa

SEQ ID NO: 2200 - RNA, 21 nt, Artificial Sequence
  Description of Artificial Sequence: Synthetic oligonucleotide
ugggcuagauaggauauacua

SEQ ID NO: 2201 - RNA, 21 nt, Artificial Sequence
  Description of Artificial Sequence: Synthetic oligonucleotide
gggcuagauaggauauacuga

SEQ ID NO: 2202 - RNA, 21 nt, Artificial Sequence
  Description of Artificial Sequence: Synthetic oligonucleotide
cuagauaggauauacuguaua

SEQ ID NO: 2203 - RNA, 21 nt, Artificial Sequence
  Description of Artificial Sequence: Synthetic oligonucleotide
uagauaggauauacuguauga

SEQ ID NO: 2204 - RNA, 21 nt, Artificial Sequence
  Description of Artificial Sequence: Synthetic oligonucleotide
acucacuuuaucaauaguuca

SEQ ID NO: 2205 - RNA, 21 nt, Artificial Sequence
  Description of Artificial Sequence: Synthetic oligonucleotide
cucacuuuaucaauaguucca

SEQ ID NO: 2206 - RNA, 21 nt, Artificial Sequence
  Description of Artificial Sequence: Synthetic oligonucleotide
ucacuuuaucaauaguuccaa

SEQ ID NO: 2207 - RNA, 21 nt, Artificial Sequence
  Description of Artificial Sequence: Synthetic oligonucleotide
cacuuuaucaauaguuccaua

SEQ ID NO: 2208 - RNA, 21 nt, Artificial Sequence
  Description of Artificial Sequence: Synthetic oligonucleotide
acuuuaucaauaguuccauua

SEQ ID NO: 2209 - RNA, 21 nt, Artificial Sequence
  Description of Artificial Sequence: Synthetic oligonucleotide
auaguuccauuuaaauugaca

SEQ ID NO: 2210 - RNA, 21 nt, Artificial Sequence
  Description of Artificial Sequence: Synthetic oligonucleotide
ggugagacuguauccuguuua

SEQ ID NO: 2211 - RNA, 21 nt, Artificial Sequence
  Description of Artificial Sequence: Synthetic oligonucleotide
gugagacuguauccuguuuga

SEQ ID NO: 2212 - RNA, 21 nt, Artificial Sequence
  Description of Artificial Sequence: Synthetic oligonucleotide
ugagacuguauccuguuugca

SEQ ID NO: 2213 - RNA, 21 nt, Artificial Sequence
  Description of Artificial Sequence: Synthetic oligonucleotide
gagacuguauccuguuugcua

SEQ ID NO: 2214 - RNA, 21 nt, Artificial Sequence
  Description of Artificial Sequence: Synthetic oligonucleotide
agacuguauccuguuugcuaa

SEQ ID NO: 2215 - RNA, 21 nt, Artificial Sequence
  Description of Artificial Sequence: Synthetic oligonucleotide
cuguauccuguuugcuauuga

SEQ ID NO: 2216 - RNA, 21 nt, Artificial Sequence
  Description of Artificial Sequence: Synthetic oligonucleotide
uguauccuguuugcuauugca

SEQ ID NO: 2217 - RNA, 21 nt, Artificial Sequence
  Description of Artificial Sequence: Synthetic oligonucleotide
guauccuguuugcuauugcua

SEQ ID NO: 2218 - RNA, 21 nt, Artificial Sequence
  Description of Artificial Sequence: Synthetic oligonucleotide
ugauuucaaccacauuugcua

SEQ ID NO: 2219 - RNA, 21 nt, Artificial Sequence
  Description of Artificial Sequence: Synthetic oligonucleotide
uauggacaucugguugcuuua

SEQ ID NO: 2220 - RNA, 21 nt, Artificial Sequence
  Description of Artificial Sequence: Synthetic oligonucleotide
auggacaucugguugcuuuga

SEQ ID NO: 2221 - RNA, 21 nt, Artificial Sequence
  Description of Artificial Sequence: Synthetic oligonucleotide
acuucugauuucucuucagca

SEQ ID NO: 2222 - RNA, 21 nt, Artificial Sequence
  Description of Artificial Sequence: Synthetic oligonucleotide
cuucugauuucucuucagcua

SEQ ID NO: 2223 - RNA, 21 nt, Artificial Sequence
  Description of Artificial Sequence: Synthetic oligonucleotide
cugauuucucuucagcuuuga

SEQ ID NO: 2224 - RNA, 21 nt, Artificial Sequence
  Description of Artificial Sequence: Synthetic oligonucleotide
ugauuucucuucagcuuugaa

SEQ ID NO: 2225 - RNA, 21 nt, Artificial Sequence
  Description of Artificial Sequence: Synthetic oligonucleotide
gauuucucuucagcuuugaaa

SEQ ID NO: 2226 - RNA, 21 nt, Artificial Sequence
  Description of Artificial Sequence: Synthetic oligonucleotide
acuugcaagucccaugauuua

SEQ ID NO: 2227 - RNA, 21 nt, Artificial Sequence
  Description of Artificial Sequence: Synthetic oligonucleotide
cuugcaagucccaugauuuca

SEQ ID NO: 2228 - RNA, 21 nt, Artificial Sequence
  Description of Artificial Sequence: Synthetic oligonucleotide
ugcaagucccaugauuucuua

SEQ ID NO: 2229 - RNA, 21 nt, Artificial Sequence
  Description of Artificial Sequence: Synthetic oligonucleotide
caagucccaugauuucuucga

SEQ ID NO: 2230 - RNA, 21 nt, Artificial Sequence
  Description of Artificial Sequence: Synthetic oligonucleotide
agucccaugauuucuucggua

SEQ ID NO: 2231 - RNA, 21 nt, Artificial Sequence
  Description of Artificial Sequence: Synthetic oligonucleotide
gucccaugauuucuucgguaa

SEQ ID NO: 2232 - RNA, 21 nt, Artificial Sequence
  Description of Artificial Sequence: Synthetic oligonucleotide
ucccaugauuucuucgguaaa

SEQ ID NO: 2233 - RNA, 21 nt, Artificial Sequence
  Description of Artificial Sequence: Synthetic oligonucleotide
cccaugauuucuucgguaaua

SEQ ID NO: 2234 - RNA, 21 nt, Artificial Sequence
  Description of Artificial Sequence: Synthetic oligonucleotide
ccaugauuucuucgguaauua

SEQ ID NO: 2235 - RNA, 21 nt, Artificial Sequence
  Description of Artificial Sequence: Synthetic oligonucleotide
agggacaugaaaucaucuuaa

SEQ ID NO: 2236 - RNA, 21 nt, Artificial Sequence
  Description of Artificial Sequence: Synthetic oligonucleotide
gggacaugaaaucaucuuaga

SEQ ID NO: 2237 - RNA, 21 nt, Artificial Sequence
  Description of Artificial Sequence: Synthetic oligonucleotide
ggacaugaaaucaucuuagca

SEQ ID NO: 2238 - RNA, 21 nt, Artificial Sequence
  Description of Artificial Sequence: Synthetic oligonucleotide
gacaugaaaucaucuuagcua

SEQ ID NO: 2239 - RNA, 21 nt, Artificial Sequence
  Description of Artificial Sequence: Synthetic oligonucleotide
acaugaaaucaucuuagcuua

SEQ ID NO: 2240 - RNA, 21 nt, Artificial Sequence
  Description of Artificial Sequence: Synthetic oligonucleotide
augaaaucaucuuagcuuaga

SEQ ID NO: 2241 - RNA, 21 nt, Artificial Sequence
  Description of Artificial Sequence: Synthetic oligonucleotide
gaaaucaucuuagcuuagcua

SEQ ID NO: 2242 - RNA, 21 nt, Artificial Sequence
  Description of Artificial Sequence: Synthetic oligonucleotide
aaaucaucuuagcuuagcuua

SEQ ID NO: 2243 - RNA, 21 nt, Artificial Sequence
  Description of Artificial Sequence: Synthetic oligonucleotide
gugaaugucuauauaguguaa

SEQ ID NO: 2244 - RNA, 21 nt, Artificial Sequence
  Description of Artificial Sequence: Synthetic oligonucleotide
aaugucuauauaguguauuga

SEQ ID NO: 2245 - RNA, 21 nt, Artificial Sequence
  Description of Artificial Sequence: Synthetic oligonucleotide
ugucuauauaguguauuguga

SEQ ID NO: 2246 - RNA, 21 nt, Artificial Sequence
  Description of Artificial Sequence: Synthetic oligonucleotide
gucuauauaguguauugugua

SEQ ID NO: 2247 - RNA, 21 nt, Artificial Sequence
  Description of Artificial Sequence: Synthetic oligonucleotide
ucuauauaguguauuguguga

SEQ ID NO: 2248 - RNA, 21 nt, Artificial Sequence
  Description of Artificial Sequence: Synthetic oligonucleotide
uauauaguguauuguguguua

SEQ ID NO: 2249 - RNA, 21 nt, Artificial Sequence
  Description of Artificial Sequence: Synthetic oligonucleotide
auauaguguauuguguguuua

SEQ ID NO: 2250 - RNA, 21 nt, Artificial Sequence
  Description of Artificial Sequence: Synthetic oligonucleotide
caaaugauuuacacugacuga

SEQ ID NO: 2251 - RNA, 21 nt, Artificial Sequence
  Description of Artificial Sequence: Synthetic oligonucleotide
aaugauuuacacugacuguua

SEQ ID NO: 2252 - RNA, 21 nt, Artificial Sequence
  Description of Artificial Sequence: Synthetic oligonucleotide
gaaauaaaguuauuacucuga

SEQ ID NO: 2253 - DNA, 23 bp, Artificial Sequence
  Description of Artificial Sequence: Synthetic oligonucleotide
  Description of Combined DNA/RNA Molecule: Synthetic oligonucleotide
ucaugcgagcutgggucacguga

SEQ ID NO: 2254 - DNA, 23 bp, Artificial Sequence
  Description of Artificial Sequence: Synthetic oligonucleotide
  Description of Combined DNA/RNA Molecule: Synthetic oligonucleotide
uccatgcgagcuugggucacgug

SEQ ID NO: 2255 - DNA, 23 bp, Artificial Sequence
  Description of Artificial Sequence: Synthetic oligonucleotide
  Description of Combined DNA/RNA Molecule: Synthetic oligonucleotide
uaccaugcgagcuugggucacgu

SEQ ID NO: 2256 - DNA, 23 bp, Artificial Sequence
  Description of Artificial Sequence: Synthetic oligonucleotide
  Description of Combined DNA/RNA Molecule: Synthetic oligonucleotide
ugaccatgcgagcuugggucacg

SEQ ID NO: 2257 - DNA, 23 bp, Artificial Sequence
  Description of Artificial Sequence: Synthetic oligonucleotide
  Description of Combined DNA/RNA Molecule: Synthetic oligonucleotide
uugaccaugcgagcuugggucac

SEQ ID NO: 2258 - DNA, 23 bp, Artificial Sequence
  Description of Artificial Sequence: Synthetic oligonucleotide
  Description of Combined DNA/RNA Molecule: Synthetic oligonucleotide
ucugaccaugcgagcuuggguca

SEQ ID NO: 2259 - DNA, 23 bp, Artificial Sequence
  Description of Artificial Sequence: Synthetic oligonucleotide
  Description of Combined DNA/RNA Molecule: Synthetic oligonucleotide
uacugaccaugcgagcuuggguc

SEQ ID NO: 2260 - DNA, 23 bp, Artificial Sequence
  Description of Artificial Sequence: Synthetic oligonucleotide
  Description of Combined DNA/RNA Molecule: Synthetic oligonucleotide
uuactgaccaugcgagcuugggu

SEQ ID NO: 2261 - DNA, 23 bp, Artificial Sequence
  Description of Artificial Sequence: Synthetic oligonucleotide
  Description of Combined DNA/RNA Molecule: Synthetic oligonucleotide
uuuacugaccaugcgagcuuggg

SEQ ID NO: 2262 - DNA, 23 bp, Artificial Sequence
  Description of Artificial Sequence: Synthetic oligonucleotide
  Description of Combined DNA/RNA Molecule: Synthetic oligonucleotide
uuugtagacuauuugcacacugc

SEQ ID NO: 2263 - DNA, 23 bp, Artificial Sequence
  Description of Artificial Sequence: Synthetic oligonucleotide
  Description of Combined DNA/RNA Molecule: Synthetic oligonucleotide
uuggtutguagacuauuugcaca

SEQ ID NO: 2264 - DNA, 23 bp, Artificial Sequence
  Description of Artificial Sequence: Synthetic oligonucleotide
  Description of Combined DNA/RNA Molecule: Synthetic oligonucleotide
uucaactgguuuguagacuauuu

SEQ ID NO: 2265 - DNA, 23 bp, Artificial Sequence
  Description of Artificial Sequence: Synthetic oligonucleotide
  Description of Combined DNA/RNA Molecule: Synthetic oligonucleotide
uggucaacugguuuguagacuau

SEQ ID NO: 2266 - DNA, 23 bp, Artificial Sequence
  Description of Artificial Sequence: Synthetic oligonucleotide
  Description of Combined DNA/RNA Molecule: Synthetic oligonucleotide
uaggtcaacugguuuguagacua

SEQ ID NO: 2267 - DNA, 23 bp, Artificial Sequence
  Description of Artificial Sequence: Synthetic oligonucleotide
  Description of Combined DNA/RNA Molecule: Synthetic oligonucleotide
uguutatgauggauguugccuaa

SEQ ID NO: 2268 - DNA, 23 bp, Artificial Sequence
  Description of Artificial Sequence: Synthetic oligonucleotide
  Description of Combined DNA/RNA Molecule: Synthetic oligonucleotide
uggutuaugauggauguugccua

SEQ ID NO: 2269 - DNA, 23 bp, Artificial Sequence
  Description of Artificial Sequence: Synthetic oligonucleotide
  Description of Combined DNA/RNA Molecule: Synthetic oligonucleotide
uuggtutaugauggauguugccu

SEQ ID NO: 2270 - DNA, 23 bp, Artificial Sequence
  Description of Artificial Sequence: Synthetic oligonucleotide
  Description of Combined DNA/RNA Molecule: Synthetic oligonucleotide
uccuggtuuaugauggauguugc

SEQ ID NO: 2271 - DNA, 23 bp, Artificial Sequence
  Description of Artificial Sequence: Synthetic oligonucleotide
  Description of Combined DNA/RNA Molecule: Synthetic oligonucleotide
uugaagtcaagcuucucagauuu

SEQ ID NO: 2272 - DNA, 23 bp, Artificial Sequence
  Description of Artificial Sequence: Synthetic oligonucleotide
  Description of Combined DNA/RNA Molecule: Synthetic oligonucleotide
uagucuaccaugucgaugcugcc

SEQ ID NO: 2273 - DNA, 23 bp, Artificial Sequence
  Description of Artificial Sequence: Synthetic oligonucleotide
  Description of Combined DNA/RNA Molecule: Synthetic oligonucleotide
ucaaauccuuuguugcugccacu

SEQ ID NO: 2274 - DNA, 23 bp, Artificial Sequence
  Description of Artificial Sequence: Synthetic oligonucleotide
  Description of Combined DNA/RNA Molecule: Synthetic oligonucleotide
utcaaatccuutguugcugccac

SEQ ID NO: 2275 - DNA, 23 bp, Artificial Sequence
  Description of Artificial Sequence: Synthetic oligonucleotide
  Description of Combined DNA/RNA Molecule: Synthetic oligonucleotide
uguutcaaauccuuuguugcugc

SEQ ID NO: 2276 - DNA, 23 bp, Artificial Sequence
  Description of Artificial Sequence: Synthetic oligonucleotide
  Description of Combined DNA/RNA Molecule: Synthetic oligonucleotide
uaagtutcaaauccuuuguugcu

SEQ ID NO: 2277 - DNA, 23 bp, Artificial Sequence
  Description of Artificial Sequence: Synthetic oligonucleotide
  Description of Combined DNA/RNA Molecule: Synthetic oligonucleotide
ucaagutucaaauccuuuguugc

SEQ ID NO: 2278 - DNA, 23 bp, Artificial Sequence
  Description of Artificial Sequence: Synthetic oligonucleotide
  Description of Combined DNA/RNA Molecule: Synthetic oligonucleotide
uccaagtuucaaauccuuuguug

SEQ ID NO: 2279 - DNA, 23 bp, Artificial Sequence
  Description of Artificial Sequence: Synthetic oligonucleotide
  Description of Combined DNA/RNA Molecule: Synthetic oligonucleotide
uaccaaguuucaaauccuuuguu

SEQ ID NO: 2280 - DNA, 23 bp, Artificial Sequence
  Description of Artificial Sequence: Synthetic oligonucleotide
  Description of Combined DNA/RNA Molecule: Synthetic oligonucleotide
ucaccaaguuucaaauccuuugu

SEQ ID NO: 2281 - DNA, 23 bp, Artificial Sequence
  Description of Artificial Sequence: Synthetic oligonucleotide
  Description of Combined DNA/RNA Molecule: Synthetic oligonucleotide
uacaccaaguutcaaauccuuug

SEQ ID NO: 2282 - DNA, 23 bp, Artificial Sequence
  Description of Artificial Sequence: Synthetic oligonucleotide
  Description of Combined DNA/RNA Molecule: Synthetic oligonucleotide
uaacacaccaaguuucaaauccu

SEQ ID NO: 2283 - DNA, 23 bp, Artificial Sequence
  Description of Artificial Sequence: Synthetic oligonucleotide
  Description of Combined DNA/RNA Molecule: Synthetic oligonucleotide
ucaaggtugacaucgucugccug

SEQ ID NO: 2284 - DNA, 23 bp, Artificial Sequence
  Description of Artificial Sequence: Synthetic oligonucleotide
  Description of Combined DNA/RNA Molecule: Synthetic oligonucleotide
uacacaagguugacaucgucugc

SEQ ID NO: 2285 - DNA, 23 bp, Artificial Sequence
  Description of Artificial Sequence: Synthetic oligonucleotide
  Description of Combined DNA/RNA Molecule: Synthetic oligonucleotide
uacucacacaagguugacaucgu

SEQ ID NO: 2286 - DNA, 23 bp, Artificial Sequence
  Description of Artificial Sequence: Synthetic oligonucleotide
  Description of Combined DNA/RNA Molecule: Synthetic oligonucleotide
uaaacaggguuucuguggagcag

SEQ ID NO: 2287 - DNA, 23 bp, Artificial Sequence
  Description of Artificial Sequence: Synthetic oligonucleotide
  Description of Combined DNA/RNA Molecule: Synthetic oligonucleotide
uuuccaaccuucagaacucaaua

SEQ ID NO: 2288 - DNA, 23 bp, Artificial Sequence
  Description of Artificial Sequence: Synthetic oligonucleotide
  Description of Combined DNA/RNA Molecule: Synthetic oligonucleotide
uguuccaaccuucagaacucaau

SEQ ID NO: 2289 - DNA, 23 bp, Artificial Sequence
  Description of Artificial Sequence: Synthetic oligonucleotide
  Description of Combined DNA/RNA Molecule: Synthetic oligonucleotide
uaagagaacugguuagcccuaaa

SEQ ID NO: 2290 - DNA, 23 bp, Artificial Sequence
  Description of Artificial Sequence: Synthetic oligonucleotide
  Description of Combined DNA/RNA Molecule: Synthetic oligonucleotide
utcacuaucauagucacucuggu

SEQ ID NO: 2291 - DNA, 23 bp, Artificial Sequence
  Description of Artificial Sequence: Synthetic oligonucleotide
  Description of Combined DNA/RNA Molecule: Synthetic oligonucleotide
uauutcaagauacaugcguccuu

SEQ ID NO: 2292 - DNA, 23 bp, Artificial Sequence
  Description of Artificial Sequence: Synthetic oligonucleotide
  Description of Combined DNA/RNA Molecule: Synthetic oligonucleotide
ugcatutcaagauacaugcgucc

SEQ ID NO: 2293 - DNA, 23 bp, Artificial Sequence
  Description of Artificial Sequence: Synthetic oligonucleotide
  Description of Combined DNA/RNA Molecule: Synthetic oligonucleotide
uagcautucaagauacaugcguc

SEQ ID NO: 2294 - DNA, 23 bp, Artificial Sequence
  Description of Artificial Sequence: Synthetic oligonucleotide
  Description of Combined DNA/RNA Molecule: Synthetic oligonucleotide
uaagcatuucaagauacaugcgu

SEQ ID NO: 2295 - DNA, 23 bp, Artificial Sequence
  Description of Artificial Sequence: Synthetic oligonucleotide
  Description of Combined DNA/RNA Molecule: Synthetic oligonucleotide
ucaagcauuucaagauacaugcg

SEQ ID NO: 2296 - DNA, 23 bp, Artificial Sequence
  Description of Artificial Sequence: Synthetic oligonucleotide
  Description of Combined DNA/RNA Molecule: Synthetic oligonucleotide
uuacaagcauuucaagauacaug

SEQ ID NO: 2297 - DNA, 23 bp, Artificial Sequence
  Description of Artificial Sequence: Synthetic oligonucleotide
  Description of Combined DNA/RNA Molecule: Synthetic oligonucleotide
uuuacaagcauuucaagauacau

SEQ ID NO: 2298 - DNA, 23 bp, Artificial Sequence
  Description of Artificial Sequence: Synthetic oligonucleotide
  Description of Combined DNA/RNA Molecule: Synthetic oligonucleotide
ucuctutacaagcauuucaagau

SEQ ID NO: 2299 - DNA, 23 bp, Artificial Sequence
  Description of Artificial Sequence: Synthetic oligonucleotide
  Description of Combined DNA/RNA Molecule: Synthetic oligonucleotide
uccucutuacaagcauuucaaga

SEQ ID NO: 2300 - DNA, 23 bp, Artificial Sequence
  Description of Artificial Sequence: Synthetic oligonucleotide
  Description of Combined DNA/RNA Molecule: Synthetic oligonucleotide
uacctctuuacaagcauuucaag

SEQ ID NO: 2301 - DNA, 23 bp, Artificial Sequence
  Description of Artificial Sequence: Synthetic oligonucleotide
  Description of Combined DNA/RNA Molecule: Synthetic oligonucleotide
uaaccucuuuacaagcauuucaa

SEQ ID NO: 2302 - DNA, 23 bp, Artificial Sequence
  Description of Artificial Sequence: Synthetic oligonucleotide
  Description of Combined DNA/RNA Molecule: Synthetic oligonucleotide
uaaacctcuuuacaagcauuuca

SEQ ID NO: 2303 - DNA, 23 bp, Artificial Sequence
  Description of Artificial Sequence: Synthetic oligonucleotide
  Description of Combined DNA/RNA Molecule: Synthetic oligonucleotide
ugaaaccucuuuacaagcauuuc

SEQ ID NO: 2304 - DNA, 23 bp, Artificial Sequence
  Description of Artificial Sequence: Synthetic oligonucleotide
  Description of Combined DNA/RNA Molecule: Synthetic oligonucleotide
uagaaaccucutuacaagcauuu

SEQ ID NO: 2305 - DNA, 23 bp, Artificial Sequence
  Description of Artificial Sequence: Synthetic oligonucleotide
  Description of Combined DNA/RNA Molecule: Synthetic oligonucleotide
utagaaaccuctuuacaagcauu

SEQ ID NO: 2306 - DNA, 23 bp, Artificial Sequence
  Description of Artificial Sequence: Synthetic oligonucleotide
  Description of Combined DNA/RNA Molecule: Synthetic oligonucleotide
uggutagaaaccucuuuacaagc

SEQ ID NO: 2307 - DNA, 23 bp, Artificial Sequence
  Description of Artificial Sequence: Synthetic oligonucleotide
  Description of Combined DNA/RNA Molecule: Synthetic oligonucleotide
ugagtutcuuuaggcagcaaugu

SEQ ID NO: 2308 - DNA, 23 bp, Artificial Sequence
  Description of Artificial Sequence: Synthetic oligonucleotide
  Description of Combined DNA/RNA Molecule: Synthetic oligonucleotide
ucugagtuucuuuaggcagcaau

SEQ ID NO: 2309 - DNA, 23 bp, Artificial Sequence
  Description of Artificial Sequence: Synthetic oligonucleotide
  Description of Combined DNA/RNA Molecule: Synthetic oligonucleotide
uuuaactguacccaaaccagaag

SEQ ID NO: 2310 - DNA, 23 bp, Artificial Sequence
  Description of Artificial Sequence: Synthetic oligonucleotide
  Description of Combined DNA/RNA Molecule: Synthetic oligonucleotide
uccutuaacugtacccaaaccag

SEQ ID NO: 2311 - DNA, 23 bp, Artificial Sequence
  Description of Artificial Sequence: Synthetic oligonucleotide
  Description of Combined DNA/RNA Molecule: Synthetic oligonucleotide
uugccutuaacuguacccaaacc

SEQ ID NO: 2312 - DNA, 23 bp, Artificial Sequence
  Description of Artificial Sequence: Synthetic oligonucleotide
  Description of Combined DNA/RNA Molecule: Synthetic oligonucleotide
utcucuaaccaccaccaaaucua

SEQ ID NO: 2313 - DNA, 23 bp, Artificial Sequence
  Description of Artificial Sequence: Synthetic oligonucleotide
  Description of Combined DNA/RNA Molecule: Synthetic oligonucleotide
ugaaactguuggcaguaaugagg

SEQ ID NO: 2314 - DNA, 23 bp, Artificial Sequence
  Description of Artificial Sequence: Synthetic oligonucleotide
  Description of Combined DNA/RNA Molecule: Synthetic oligonucleotide
ucgaaacuguuggcaguaaugag

SEQ ID NO: 2315 - DNA, 23 bp, Artificial Sequence
  Description of Artificial Sequence: Synthetic oligonucleotide
  Description of Combined DNA/RNA Molecule: Synthetic oligonucleotide
uagccgaaacuguuggcaguaau

SEQ ID NO: 2316 - DNA, 23 bp, Artificial Sequence
  Description of Artificial Sequence: Synthetic oligonucleotide
  Description of Combined DNA/RNA Molecule: Synthetic oligonucleotide
uagaactucaggaagaggaaccg

SEQ ID NO: 2317 - DNA, 23 bp, Artificial Sequence
  Description of Artificial Sequence: Synthetic oligonucleotide
  Description of Combined DNA/RNA Molecule: Synthetic oligonucleotide
uaagaacuucaggaagaggaacc

SEQ ID NO: 2318 - DNA, 23 bp, Artificial Sequence
  Description of Artificial Sequence: Synthetic oligonucleotide
  Description of Combined DNA/RNA Molecule: Synthetic oligonucleotide
ucaagaacuucaggaagaggaac

SEQ ID NO: 2319 - DNA, 23 bp, Artificial Sequence
  Description of Artificial Sequence: Synthetic oligonucleotide
  Description of Combined DNA/RNA Molecule: Synthetic oligonucleotide
uacaagaacuucaggaagaggaa

SEQ ID NO: 2320 - DNA, 23 bp, Artificial Sequence
  Description of Artificial Sequence: Synthetic oligonucleotide
  Description of Combined DNA/RNA Molecule: Synthetic oligonucleotide
ucacaagaacutcaggaagagga

SEQ ID NO: 2321 - DNA, 23 bp, Artificial Sequence
  Description of Artificial Sequence: Synthetic oligonucleotide
  Description of Combined DNA/RNA Molecule: Synthetic oligonucleotide
ugcacaagaactucaggaagagg

SEQ ID NO: 2322 - DNA, 23 bp, Artificial Sequence
  Description of Artificial Sequence: Synthetic oligonucleotide
  Description of Combined DNA/RNA Molecule: Synthetic oligonucleotide
uaaaccaugaucuuaggcuggcc

SEQ ID NO: 2323 - DNA, 23 bp, Artificial Sequence
  Description of Artificial Sequence: Synthetic oligonucleotide
  Description of Combined DNA/RNA Molecule: Synthetic oligonucleotide
ucuaaaccaugaucuuaggcugg

SEQ ID NO: 2324 - DNA, 23 bp, Artificial Sequence
  Description of Artificial Sequence: Synthetic oligonucleotide
  Description of Combined DNA/RNA Molecule: Synthetic oligonucleotide
uccuaaaccaugaucuuaggcug

SEQ ID NO: 2325 - DNA, 23 bp, Artificial Sequence
  Description of Artificial Sequence: Synthetic oligonucleotide
  Description of Combined DNA/RNA Molecule: Synthetic oligonucleotide
uaautuaucugccagcacugauc

SEQ ID NO: 2326 - DNA, 23 bp, Artificial Sequence
  Description of Artificial Sequence: Synthetic oligonucleotide
  Description of Combined DNA/RNA Molecule: Synthetic oligonucleotide
uuaagatcacaagccagcgugcc

SEQ ID NO: 2327 - DNA, 23 bp, Artificial Sequence
  Description of Artificial Sequence: Synthetic oligonucleotide
  Description of Combined DNA/RNA Molecule: Synthetic oligonucleotide
uaguauauccuaucuagcccacc

SEQ ID NO: 2328 - DNA, 23 bp, Artificial Sequence
  Description of Artificial Sequence: Synthetic oligonucleotide
  Description of Combined DNA/RNA Molecule: Synthetic oligonucleotide
ucagtataucctaucuagcccac

SEQ ID NO: 2329 - DNA, 23 bp, Artificial Sequence
  Description of Artificial Sequence: Synthetic oligonucleotide
  Description of Combined DNA/RNA Molecule: Synthetic oligonucleotide
uauacaguauauccuaucuagcc

SEQ ID NO: 2330 - DNA, 23 bp, Artificial Sequence
  Description of Artificial Sequence: Synthetic oligonucleotide
  Description of Combined DNA/RNA Molecule: Synthetic oligonucleotide
ucauacaguauauccuaucuagc

SEQ ID NO: 2331 - DNA, 23 bp, Artificial Sequence
  Description of Artificial Sequence: Synthetic oligonucleotide
  Description of Combined DNA/RNA Molecule: Synthetic oligonucleotide
ugaacuauugataaagugaguca

SEQ ID NO: 2332 - DNA, 23 bp, Artificial Sequence
  Description of Artificial Sequence: Synthetic oligonucleotide
  Description of Combined DNA/RNA Molecule: Synthetic oligonucleotide
uggaactauugauaaagugaguc

SEQ ID NO: 2333 - DNA, 23 bp, Artificial Sequence
  Description of Artificial Sequence: Synthetic oligonucleotide
  Description of Combined DNA/RNA Molecule: Synthetic oligonucleotide
uuggaacuauugauaaagugagu

SEQ ID NO: 2334 - DNA, 23 bp, Artificial Sequence
  Description of Artificial Sequence: Synthetic oligonucleotide
  Description of Combined DNA/RNA Molecule: Synthetic oligonucleotide
uauggaacuauugauaaagugag

SEQ ID NO: 2335 - DNA, 23 bp, Artificial Sequence
  Description of Artificial Sequence: Synthetic oligonucleotide
  Description of Combined DNA/RNA Molecule: Synthetic oligonucleotide
uaauggaacuauugauaaaguga

SEQ ID NO: 2336 - DNA, 23 bp, Artificial Sequence
  Description of Artificial Sequence: Synthetic oligonucleotide
  Description of Combined DNA/RNA Molecule: Synthetic oligonucleotide
ugucaatuuaaauggaacuauug

SEQ ID NO: 2337 - DNA, 23 bp, Artificial Sequence
  Description of Artificial Sequence: Synthetic oligonucleotide
  Description of Combined DNA/RNA Molecule: Synthetic oligonucleotide
uaaacaggauacagucucaccac

SEQ ID NO: 2338 - DNA, 23 bp, Artificial Sequence
  Description of Artificial Sequence: Synthetic oligonucleotide
  Description of Combined DNA/RNA Molecule: Synthetic oligonucleotide
ucaaacaggauacagucucacca

SEQ ID NO: 2339 - DNA, 23 bp, Artificial Sequence
  Description of Artificial Sequence: Synthetic oligonucleotide
  Description of Combined DNA/RNA Molecule: Synthetic oligonucleotide
ugcaaacaggatacagucucacc

SEQ ID NO: 2340 - DNA, 23 bp, Artificial Sequence
  Description of Artificial Sequence: Synthetic oligonucleotide
  Description of Combined DNA/RNA Molecule: Synthetic oligonucleotide
uagcaaacaggauacagucucac

SEQ ID NO: 2341 - DNA, 23 bp, Artificial Sequence
  Description of Artificial Sequence: Synthetic oligonucleotide
  Description of Combined DNA/RNA Molecule: Synthetic oligonucleotide
utagcaaacaggauacagucuca

SEQ ID NO: 2342 - DNA, 23 bp, Artificial Sequence
  Description of Artificial Sequence: Synthetic oligonucleotide
  Description of Combined DNA/RNA Molecule: Synthetic oligonucleotide
ucaatagcaaacaggauacaguc

SEQ ID NO: 2343 - RNA, 23 nt, Artificial Sequence
  Description of Artificial Sequence: Synthetic oligonucleotide
accagagugacuaugauagugaa

SEQ ID NO: 2344 - RNA, 23 nt, Artificial Sequence
  Description of Artificial Sequence: Synthetic oligonucleotide
aaggacgcauguaucuugaaaug

SEQ ID NO: 2345 - RNA, 23 nt, Artificial Sequence
  Description of Artificial Sequence: Synthetic oligonucleotide
ggacgcauguaucuugaaaugcu

SEQ ID NO: 2346 - RNA, 23 nt, Artificial Sequence
  Description of Artificial Sequence: Synthetic oligonucleotide
gacgcauguaucuugaaaugcuu

SEQ ID NO: 2347 - RNA, 23 nt, Artificial Sequence
  Description of Artificial Sequence: Synthetic oligonucleotide
acgcauguaucuugaaaugcuug

SEQ ID NO: 2348 - RNA, 23 nt, Artificial Sequence
  Description of Artificial Sequence: Synthetic oligonucleotide
cgcauguaucuugaaaugcuugu

SEQ ID NO: 2349 - RNA, 23 nt, Artificial Sequence
  Description of Artificial Sequence: Synthetic oligonucleotide
cauguaucuugaaaugcuuguaa

SEQ ID NO: 2350 - RNA, 23 nt, Artificial Sequence
  Description of Artificial Sequence: Synthetic oligonucleotide
auguaucuugaaaugcuuguaaa

SEQ ID NO: 2351 - RNA, 23 nt, Artificial Sequence
  Description of Artificial Sequence: Synthetic oligonucleotide
aucuugaaaugcuuguaaagagg

SEQ ID NO: 2352 - RNA, 23 nt, Artificial Sequence
  Description of Artificial Sequence: Synthetic oligonucleotide
ucuugaaaugcuuguaaagaggu

SEQ ID NO: 2353 - RNA, 23 nt, Artificial Sequence
  Description of Artificial Sequence: Synthetic oligonucleotide
cuugaaaugcuuguaaagagguu

SEQ ID NO: 2354 - RNA, 23 nt, Artificial Sequence
  Description of Artificial Sequence: Synthetic oligonucleotide
uugaaaugcuuguaaagagguuu

SEQ ID NO: 2355 - RNA, 23 nt, Artificial Sequence
  Description of Artificial Sequence: Synthetic oligonucleotide
ugaaaugcuuguaaagagguuuc

SEQ ID NO: 2356 - RNA, 23 nt, Artificial Sequence
  Description of Artificial Sequence: Synthetic oligonucleotide
gaaaugcuuguaaagagguuucu

SEQ ID NO: 2357 - RNA, 23 nt, Artificial Sequence
  Description of Artificial Sequence: Synthetic oligonucleotide
aaaugcuuguaaagagguuucua

SEQ ID NO: 2358 - RNA, 23 nt, Artificial Sequence
  Description of Artificial Sequence: Synthetic oligonucleotide
aaugcuuguaaagagguuucuaa

SEQ ID NO: 2359 - RNA, 23 nt, Artificial Sequence
  Description of Artificial Sequence: Synthetic oligonucleotide
gcuuguaaagagguuucuaaccc

SEQ ID NO: 2360 - RNA, 23 nt, Artificial Sequence
  Description of Artificial Sequence: Synthetic oligonucleotide
acauugcugccuaaagaaacuca

SEQ ID NO: 2361 - RNA, 23 nt, Artificial Sequence
  Description of Artificial Sequence: Synthetic oligonucleotide
auugcugccuaaagaaacucagc

SEQ ID NO: 2362 - RNA, 23 nt, Artificial Sequence
  Description of Artificial Sequence: Synthetic oligonucleotide
cuucugguuuggguacaguuaaa

SEQ ID NO: 2363 - RNA, 23 nt, Artificial Sequence
  Description of Artificial Sequence: Synthetic oligonucleotide
cugguuuggguacaguuaaaggc

SEQ ID NO: 2364 - RNA, 23 nt, Artificial Sequence
  Description of Artificial Sequence: Synthetic oligonucleotide
gguuuggguacaguuaaaggcaa

SEQ ID NO: 2365 - RNA, 23 nt, Artificial Sequence
  Description of Artificial Sequence: Synthetic oligonucleotide
uagauuugguggugguuagagau

SEQ ID NO: 2366 - RNA, 23 nt, Artificial Sequence
  Description of Artificial Sequence: Synthetic oligonucleotide
ccucauuacugccaacaguuucg

SEQ ID NO: 2367 - RNA, 23 nt, Artificial Sequence
  Description of Artificial Sequence: Synthetic oligonucleotide
cucauuacugccaacaguuucgg

SEQ ID NO: 2368 - RNA, 23 nt, Artificial Sequence
  Description of Artificial Sequence: Synthetic oligonucleotide
auuacugccaacaguuucggcug

SEQ ID NO: 2369 - RNA, 23 nt, Artificial Sequence
  Description of Artificial Sequence: Synthetic oligonucleotide
cgguuccucuuccugaaguucuu

SEQ ID NO: 2370 - RNA, 23 nt, Artificial Sequence
  Description of Artificial Sequence: Synthetic oligonucleotide
gguuccucuuccugaaguucuug

SEQ ID NO: 2371 - RNA, 23 nt, Artificial Sequence
  Description of Artificial Sequence: Synthetic oligonucleotide
guuccucuuccugaaguucuugu

SEQ ID NO: 2372 - RNA, 23 nt, Artificial Sequence
  Description of Artificial Sequence: Synthetic oligonucleotide
uuccucuuccugaaguucuugug

SEQ ID NO: 2373 - RNA, 23 nt, Artificial Sequence
  Description of Artificial Sequence: Synthetic oligonucleotide
uccucuuccugaaguucuugugc

SEQ ID NO: 2374 - RNA, 23 nt, Artificial Sequence
  Description of Artificial Sequence: Synthetic oligonucleotide
ccucuuccugaaguucuugugcc

SEQ ID NO: 2375 - RNA, 23 nt, Artificial Sequence
  Description of Artificial Sequence: Synthetic oligonucleotide
ggccagccuaagaucaugguuua

SEQ ID NO: 2376 - RNA, 23 nt, Artificial Sequence
  Description of Artificial Sequence: Synthetic oligonucleotide
ccagccuaagaucaugguuuagg

SEQ ID NO: 2377 - RNA, 23 nt, Artificial Sequence
  Description of Artificial Sequence: Synthetic oligonucleotide
cagccuaagaucaugguuuaggg

SEQ ID NO: 2378 - RNA, 23 nt, Artificial Sequence
  Description of Artificial Sequence: Synthetic oligonucleotide
gaucagugcuggcagauaaauug

SEQ ID NO: 2379 - RNA, 23 nt, Artificial Sequence
  Description of Artificial Sequence: Synthetic oligonucleotide
ggcacgcuggcuugugaucuuaa

SEQ ID NO: 2380 - RNA, 23 nt, Artificial Sequence
  Description of Artificial Sequence: Synthetic oligonucleotide
ggugggcuagauaggauauacug

SEQ ID NO: 2381 - RNA, 23 nt, Artificial Sequence
  Description of Artificial Sequence: Synthetic oligonucleotide
gugggcuagauaggauauacugu

SEQ ID NO: 2382 - RNA, 23 nt, Artificial Sequence
  Description of Artificial Sequence: Synthetic oligonucleotide
ggcuagauaggauauacuguaug

SEQ ID NO: 2383 - RNA, 23 nt, Artificial Sequence
  Description of Artificial Sequence: Synthetic oligonucleotide
gcuagauaggauauacuguaugc

SEQ ID NO: 2384 - RNA, 23 nt, Artificial Sequence
  Description of Artificial Sequence: Synthetic oligonucleotide
ugacucacuuuaucaauaguucc

SEQ ID NO: 2385 - RNA, 23 nt, Artificial Sequence
  Description of Artificial Sequence: Synthetic oligonucleotide
gacucacuuuaucaauaguucca

SEQ ID NO: 2386 - RNA, 23 nt, Artificial Sequence
  Description of Artificial Sequence: Synthetic oligonucleotide
acucacuuuaucaauaguuccau

SEQ ID NO: 2387 - RNA, 23 nt, Artificial Sequence
  Description of Artificial Sequence: Synthetic oligonucleotide
cucacuuuaucaauaguuccauu

SEQ ID NO: 2388 - RNA, 23 nt, Artificial Sequence
  Description of Artificial Sequence: Synthetic oligonucleotide
ucacuuuaucaauaguuccauuu

SEQ ID NO: 2389 - RNA, 23 nt, Artificial Sequence
  Description of Artificial Sequence: Synthetic oligonucleotide
caauaguuccauuuaaauugacu

SEQ ID NO: 2390 - RNA, 23 nt, Artificial Sequence
  Description of Artificial Sequence: Synthetic oligonucleotide
guggugagacuguauccuguuug

SEQ ID NO: 2391 - RNA, 23 nt, Artificial Sequence
  Description of Artificial Sequence: Synthetic oligonucleotide
uggugagacuguauccuguuugc

SEQ ID NO: 2392 - RNA, 23 nt, Artificial Sequence
  Description of Artificial Sequence: Synthetic oligonucleotide
ggugagacuguauccuguuugcu

SEQ ID NO: 2393 - RNA, 23 nt, Artificial Sequence
  Description of Artificial Sequence: Synthetic oligonucleotide
gugagacuguauccuguuugcua

SEQ ID NO: 2394 - RNA, 23 nt, Artificial Sequence
  Description of Artificial Sequence: Synthetic oligonucleotide
ugagacuguauccuguuugcuau

SEQ ID NO: 2395 - RNA, 23 nt, Artificial Sequence
  Description of Artificial Sequence: Synthetic oligonucleotide
gacuguauccuguuugcuauugc

SEQ ID NO: 2396 - RNA, 23 nt, Artificial Sequence
  Description of Artificial Sequence: Synthetic oligonucleotide
acuguauccuguuugcuauugcu

SEQ ID NO: 2397 - RNA, 23 nt, Artificial Sequence
  Description of Artificial Sequence: Synthetic oligonucleotide
cuguauccuguuugcuauugcuu

SEQ ID NO: 2398 - RNA, 23 nt, Artificial Sequence
  Description of Artificial Sequence: Synthetic oligonucleotide
caugauuucaaccacauuugcua

SEQ ID NO: 2399 - RNA, 23 nt, Artificial Sequence
  Description of Artificial Sequence: Synthetic oligonucleotide
aauauggacaucugguugcuuug

SEQ ID NO: 2400 - RNA, 23 nt, Artificial Sequence
  Description of Artificial Sequence: Synthetic oligonucleotide
auauggacaucugguugcuuugg

SEQ ID NO: 2401 - RNA, 23 nt, Artificial Sequence
  Description of Artificial Sequence: Synthetic oligonucleotide
aaacuucugauuucucuucagcu

SEQ ID NO: 2402 - RNA, 23 nt, Artificial Sequence
  Description of Artificial Sequence: Synthetic oligonucleotide
aacuucugauuucucuucagcuu

SEQ ID NO: 2403 - RNA, 23 nt, Artificial Sequence
  Description of Artificial Sequence: Synthetic oligonucleotide
uucugauuucucuucagcuuuga

SEQ ID NO: 2404 - RNA, 23 nt, Artificial Sequence
  Description of Artificial Sequence: Synthetic oligonucleotide
ucugauuucucuucagcuuugaa

SEQ ID NO: 2405 - RNA, 23 nt, Artificial Sequence
  Description of Artificial Sequence: Synthetic oligonucleotide
cugauuucucuucagcuuugaaa

SEQ ID NO: 2406 - RNA, 23 nt, Artificial Sequence
  Description of Artificial Sequence: Synthetic oligonucleotide
gcacuugcaagucccaugauuuc

SEQ ID NO: 2407 - RNA, 23 nt, Artificial Sequence
  Description of Artificial Sequence: Synthetic oligonucleotide
cacuugcaagucccaugauuucu

SEQ ID NO: 2408 - RNA, 23 nt, Artificial Sequence
  Description of Artificial Sequence: Synthetic oligonucleotide
cuugcaagucccaugauuucuuc

SEQ ID NO: 2409 - RNA, 23 nt, Artificial Sequence
  Description of Artificial Sequence: Synthetic oligonucleotide
ugcaagucccaugauuucuucgg

SEQ ID NO: 2410 - RNA, 23 nt, Artificial Sequence
  Description of Artificial Sequence: Synthetic oligonucleotide
caagucccaugauuucuucggua

SEQ ID NO: 2411 - RNA, 23 nt, Artificial Sequence
  Description of Artificial Sequence: Synthetic oligonucleotide
aagucccaugauuucuucgguaa

SEQ ID NO: 2412 - RNA, 23 nt, Artificial Sequence
  Description of Artificial Sequence: Synthetic oligonucleotide
agucccaugauuucuucgguaau

SEQ ID NO: 2413 - RNA, 23 nt, Artificial Sequence
  Description of Artificial Sequence: Synthetic oligonucleotide
gucccaugauuucuucgguaauu

SEQ ID NO: 2414 - RNA, 23 nt, Artificial Sequence
  Description of Artificial Sequence: Synthetic oligonucleotide
ucccaugauuucuucgguaauuc

SEQ ID NO: 2415 - RNA, 23 nt, Artificial Sequence
  Description of Artificial Sequence: Synthetic oligonucleotide
ggagggacaugaaaucaucuuag

SEQ ID NO: 2416 - RNA, 23 nt, Artificial Sequence
  Description of Artificial Sequence: Synthetic oligonucleotide
gagggacaugaaaucaucuuagc

SEQ ID NO: 2417 - RNA, 23 nt, Artificial Sequence
  Description of Artificial Sequence: Synthetic oligonucleotide
agggacaugaaaucaucuuagcu

SEQ ID NO: 2418 - RNA, 23 nt, Artificial Sequence
  Description of Artificial Sequence: Synthetic oligonucleotide
gggacaugaaaucaucuuagcuu

SEQ ID NO: 2419 - RNA, 23 nt, Artificial Sequence
  Description of Artificial Sequence: Synthetic oligonucleotide
ggacaugaaaucaucuuagcuua

SEQ ID NO: 2420 - RNA, 23 nt, Artificial Sequence
  Description of Artificial Sequence: Synthetic oligonucleotide
acaugaaaucaucuuagcuuagc

SEQ ID NO: 2421 - RNA, 23 nt, Artificial Sequence
  Description of Artificial Sequence: Synthetic oligonucleotide
augaaaucaucuuagcuuagcuu

SEQ ID NO: 2422 - RNA, 23 nt, Artificial Sequence
  Description of Artificial Sequence: Synthetic oligonucleotide
ugaaaucaucuuagcuuagcuuu

SEQ ID NO: 2423 - RNA, 23 nt, Artificial Sequence
  Description of Artificial Sequence: Synthetic oligonucleotide
cugugaaugucuauauaguguau

SEQ ID NO: 2424 - RNA, 23 nt, Artificial Sequence
  Description of Artificial Sequence: Synthetic oligonucleotide
ugaaugucuauauaguguauugu

SEQ ID NO: 2425 - RNA, 23 nt, Artificial Sequence
  Description of Artificial Sequence: Synthetic oligonucleotide
aaugucuauauaguguauugugu

SEQ ID NO: 2426 - RNA, 23 nt, Artificial Sequence
  Description of Artificial Sequence: Synthetic oligonucleotide
augucuauauaguguauugugug

SEQ ID NO: 2427 - RNA, 23 nt, Artificial Sequence
  Description of Artificial Sequence: Synthetic oligonucleotide
ugucuauauaguguauugugugu

SEQ ID NO: 2428 - RNA, 23 nt, Artificial Sequence
  Description of Artificial Sequence: Synthetic oligonucleotide
ucuauauaguguauuguguguuu

SEQ ID NO: 2429 - RNA, 23 nt, Artificial Sequence
  Description of Artificial Sequence: Synthetic oligonucleotide
cuauauaguguauuguguguuuu

SEQ ID NO: 2430 - RNA, 23 nt, Artificial Sequence
  Description of Artificial Sequence: Synthetic oligonucleotide
aacaaaugauuuacacugacugu

SEQ ID NO: 2431 - RNA, 23 nt, Artificial Sequence
  Description of Artificial Sequence: Synthetic oligonucleotide
caaaugauuuacacugacuguug

SEQ ID NO: 2432 - RNA, 23 nt, Artificial Sequence
  Description of Artificial Sequence: Synthetic oligonucleotide
uggaaauaaaguuauuacucuga

SEQ ID NO: 2433 - RNA, 21 nt, Artificial Sequence
  Description of Artificial Sequence: Synthetic oligonucleotide
acgugacccaagcucgcauga

SEQ ID NO: 2434 - RNA, 21 nt, Artificial Sequence
  Description of Artificial Sequence: Synthetic oligonucleotide
cgugacccaagcucgcaugga

SEQ ID NO: 2435 - RNA, 21 nt, Artificial Sequence
  Description of Artificial Sequence: Synthetic oligonucleotide
gugacccaagcucgcauggua

SEQ ID NO: 2436 - RNA, 21 nt, Artificial Sequence
  Description of Artificial Sequence: Synthetic oligonucleotide
ugacccaagcucgcaugguca

SEQ ID NO: 2437 - RNA, 21 nt, Artificial Sequence
  Description of Artificial Sequence: Synthetic oligonucleotide
gacccaagcucgcauggucaa

SEQ ID NO: 2438 - RNA, 21 nt, Artificial Sequence
  Description of Artificial Sequence: Synthetic oligonucleotide
acccaagcucgcauggucaga

SEQ ID NO: 2439 - RNA, 21 nt, Artificial Sequence
  Description of Artificial Sequence: Synthetic oligonucleotide
cccaagcucgcauggucagua

SEQ ID NO: 2440 - RNA, 21 nt, Artificial Sequence
  Description of Artificial Sequence: Synthetic oligonucleotide
ccaagcucgcauggucaguaa

SEQ ID NO: 2441 - RNA, 21 nt, Artificial Sequence
  Description of Artificial Sequence: Synthetic oligonucleotide
caagcucgcauggucaguaaa

SEQ ID NO: 2442 - RNA, 21 nt, Artificial Sequence
  Description of Artificial Sequence: Synthetic oligonucleotide
aagcucgcauggucaguaaaa

SEQ ID NO: 2443 - RNA, 21 nt, Artificial Sequence
  Description of Artificial Sequence: Synthetic oligonucleotide
agcucgcauggucaguaaaaa

SEQ ID NO: 2444 - RNA, 21 nt, Artificial Sequence
  Description of Artificial Sequence: Synthetic oligonucleotide
gcucgcauggucaguaaaaga

SEQ ID NO: 2445 - RNA, 21 nt, Artificial Sequence
  Description of Artificial Sequence: Synthetic oligonucleotide
cucgcauggucaguaaaagca

SEQ ID NO: 2446 - RNA, 21 nt, Artificial Sequence
  Description of Artificial Sequence: Synthetic oligonucleotide
ucgcauggucaguaaaagcaa

SEQ ID NO: 2447 - RNA, 21 nt, Artificial Sequence
  Description of Artificial Sequence: Synthetic oligonucleotide
cgcauggucaguaaaagcaaa

SEQ ID NO: 2448 - RNA, 21 nt, Artificial Sequence
  Description of Artificial Sequence: Synthetic oligonucleotide
gcauggucaguaaaagcaaaa

SEQ ID NO: 2449 - RNA, 21 nt, Artificial Sequence
  Description of Artificial Sequence: Synthetic oligonucleotide
cauggucaguaaaagcaaaga

SEQ ID NO: 2450 - RNA, 21 nt, Artificial Sequence
  Description of Artificial Sequence: Synthetic oligonucleotide
auggucaguaaaagcaaagaa

SEQ ID NO: 2451 - RNA, 21 nt, Artificial Sequence
  Description of Artificial Sequence: Synthetic oligonucleotide
uggucaguaaaagcaaagaca

SEQ ID NO: 2452 - RNA, 21 nt, Artificial Sequence
  Description of Artificial Sequence: Synthetic oligonucleotide
ggucaguaaaagcaaagacga

SEQ ID NO: 2453 - RNA, 21 nt, Artificial Sequence
  Description of Artificial Sequence: Synthetic oligonucleotide
gucaguaaaagcaaagacgga

SEQ ID NO: 2454 - RNA, 21 nt, Artificial Sequence
  Description of Artificial Sequence: Synthetic oligonucleotide
ucaguaaaagcaaagacggga

SEQ ID NO: 2455 - RNA, 21 nt, Artificial Sequence
  Description of Artificial Sequence: Synthetic oligonucleotide
caguaaaagcaaagacgggaa

SEQ ID NO: 2456 - RNA, 21 nt, Artificial Sequence
  Description of Artificial Sequence: Synthetic oligonucleotide
aguaaaagcaaagacgggaca

SEQ ID NO: 2457 - RNA, 21 nt, Artificial Sequence
  Description of Artificial Sequence: Synthetic oligonucleotide
guaaaagcaaagacgggacua

SEQ ID NO: 2458 - RNA, 21 nt, Artificial Sequence
  Description of Artificial Sequence: Synthetic oligonucleotide
auaauaucaaacacgucccga

SEQ ID NO: 2459 - RNA, 21 nt, Artificial Sequence
  Description of Artificial Sequence: Synthetic oligonucleotide
uaauaucaaacacgucccgga

SEQ ID NO: 2460 - RNA, 21 nt, Artificial Sequence
  Description of Artificial Sequence: Synthetic oligonucleotide
aauaucaaacacgucccggga

SEQ ID NO: 2461 - RNA, 21 nt, Artificial Sequence
  Description of Artificial Sequence: Synthetic oligonucleotide
auaucaaacacgucccgggaa

SEQ ID NO: 2462 - RNA, 21 nt, Artificial Sequence
  Description of Artificial Sequence: Synthetic oligonucleotide
uaucaaacacgucccgggaga

SEQ ID NO: 2463 - RNA, 21 nt, Artificial Sequence
  Description of Artificial Sequence: Synthetic oligonucleotide
aucaaacacgucccgggagga

SEQ ID NO: 2464 - RNA, 21 nt, Artificial Sequence
  Description of Artificial Sequence: Synthetic oligonucleotide
ucaaacacgucccgggaggca

SEQ ID NO: 2465 - RNA, 21 nt, Artificial Sequence
  Description of Artificial Sequence: Synthetic oligonucleotide
caaacacgucccgggaggcga

SEQ ID NO: 2466 - RNA, 21 nt, Artificial Sequence
  Description of Artificial Sequence: Synthetic oligonucleotide
aaacacgucccgggaggcgga

SEQ ID NO: 2467 - RNA, 21 nt, Artificial Sequence
  Description of Artificial Sequence: Synthetic oligonucleotide
aacacgucccgggaggcggca

SEQ ID NO: 2468 - RNA, 21 nt, Artificial Sequence
  Description of Artificial Sequence: Synthetic oligonucleotide
acacgucccgggaggcggcaa

SEQ ID NO: 2469 - RNA, 21 nt, Artificial Sequence
  Description of Artificial Sequence: Synthetic oligonucleotide
cacgucccgggaggcggcaga

SEQ ID NO: 2470 - RNA, 21 nt, Artificial Sequence
  Description of Artificial Sequence: Synthetic oligonucleotide
acgucccgggaggcggcagua

SEQ ID NO: 2471 - RNA, 21 nt, Artificial Sequence
  Description of Artificial Sequence: Synthetic oligonucleotide
cgucccgggaggcggcaguga

SEQ ID NO: 2472 - RNA, 21 nt, Artificial Sequence
  Description of Artificial Sequence: Synthetic oligonucleotide
gucccgggaggcggcagugua

SEQ ID NO: 2473 - RNA, 21 nt, Artificial Sequence
  Description of Artificial Sequence: Synthetic oligonucleotide
ucccgggaggcggcaguguga

SEQ ID NO: 2474 - RNA, 21 nt, Artificial Sequence
  Description of Artificial Sequence: Synthetic oligonucleotide
cccgggaggcggcagugugca

SEQ ID NO: 2475 - RNA, 21 nt, Artificial Sequence
  Description of Artificial Sequence: Synthetic oligonucleotide
ccgggaggcggcagugugcaa

SEQ ID NO: 2476 - RNA, 21 nt, Artificial Sequence
  Description of Artificial Sequence: Synthetic oligonucleotide
cgggaggcggcagugugcaaa

SEQ ID NO: 2477 - RNA, 21 nt, Artificial Sequence
  Description of Artificial Sequence: Synthetic oligonucleotide
gggaggcggcagugugcaaaa

SEQ ID NO: 2478 - RNA, 21 nt, Artificial Sequence
  Description of Artificial Sequence: Synthetic oligonucleotide
ggaggcggcagugugcaaaua

SEQ ID NO: 2479 - RNA, 21 nt, Artificial Sequence
  Description of Artificial Sequence: Synthetic oligonucleotide
cagugugcaaauagucuacaa

SEQ ID NO: 2480 - RNA, 21 nt, Artificial Sequence
  Description of Artificial Sequence: Synthetic oligonucleotide
agugugcaaauagucuacaaa

SEQ ID NO: 2481 - RNA, 21 nt, Artificial Sequence
  Description of Artificial Sequence: Synthetic oligonucleotide
gugugcaaauagucuacaaaa

SEQ ID NO: 2482 - RNA, 21 nt, Artificial Sequence
  Description of Artificial Sequence: Synthetic oligonucleotide
ugugcaaauagucuacaaaca

SEQ ID NO: 2483 - RNA, 21 nt, Artificial Sequence
  Description of Artificial Sequence: Synthetic oligonucleotide
gugcaaauagucuacaaacca

SEQ ID NO: 2484 - RNA, 21 nt, Artificial Sequence
  Description of Artificial Sequence: Synthetic oligonucleotide
ugcaaauagucuacaaaccaa

SEQ ID NO: 2485 - RNA, 21 nt, Artificial Sequence
  Description of Artificial Sequence: Synthetic oligonucleotide
gcaaauagucuacaaaccaga

SEQ ID NO: 2486 - RNA, 21 nt, Artificial Sequence
  Description of Artificial Sequence: Synthetic oligonucleotide
caaauagucuacaaaccagua

SEQ ID NO: 2487 - RNA, 21 nt, Artificial Sequence
  Description of Artificial Sequence: Synthetic oligonucleotide
aaauagucuacaaaccaguua

SEQ ID NO: 2488 - RNA, 21 nt, Artificial Sequence
  Description of Artificial Sequence: Synthetic oligonucleotide
aauagucuacaaaccaguuga

SEQ ID NO: 2489 - RNA, 21 nt, Artificial Sequence
  Description of Artificial Sequence: Synthetic oligonucleotide
auagucuacaaaccaguugaa

SEQ ID NO: 2490 - RNA, 21 nt, Artificial Sequence
  Description of Artificial Sequence: Synthetic oligonucleotide
uagucuacaaaccaguugaca

SEQ ID NO: 2491 - RNA, 21 nt, Artificial Sequence
  Description of Artificial Sequence: Synthetic oligonucleotide
agucuacaaaccaguugacca

SEQ ID NO: 2492 - RNA, 21 nt, Artificial Sequence
  Description of Artificial Sequence: Synthetic oligonucleotide
gucuacaaaccaguugaccua

SEQ ID NO: 2493 - RNA, 21 nt, Artificial Sequence
  Description of Artificial Sequence: Synthetic oligonucleotide
ucuacaaaccaguugaccuga

SEQ ID NO: 2494 - RNA, 21 nt, Artificial Sequence
  Description of Artificial Sequence: Synthetic oligonucleotide
cuacaaaccaguugaccugaa

SEQ ID NO: 2495 - RNA, 21 nt, Artificial Sequence
  Description of Artificial Sequence: Synthetic oligonucleotide
uacaaaccaguugaccugaga

SEQ ID NO: 2496 - RNA, 21 nt, Artificial Sequence
  Description of Artificial Sequence: Synthetic oligonucleotide
acaaaccaguugaccugagca

SEQ ID NO: 2497 - RNA, 21 nt, Artificial Sequence
  Description of Artificial Sequence: Synthetic oligonucleotide
caaaccaguugaccugagcaa

SEQ ID NO: 2498 - RNA, 21 nt, Artificial Sequence
  Description of Artificial Sequence: Synthetic oligonucleotide
aaaccaguugaccugagcaaa

SEQ ID NO: 2499 - RNA, 21 nt, Artificial Sequence
  Description of Artificial Sequence: Synthetic oligonucleotide
aaccaguugaccugagcaaga

SEQ ID NO: 2500 - RNA, 21 nt, Artificial Sequence
  Description of Artificial Sequence: Synthetic oligonucleotide
caacauccaucauaaaccaga

SEQ ID NO: 2501 - RNA, 21 nt, Artificial Sequence
  Description of Artificial Sequence: Synthetic oligonucleotide
aacauccaucauaaaccagga

SEQ ID NO: 2502 - RNA, 21 nt, Artificial Sequence
  Description of Artificial Sequence: Synthetic oligonucleotide
acauccaucauaaaccaggaa

SEQ ID NO: 2503 - RNA, 21 nt, Artificial Sequence
  Description of Artificial Sequence: Synthetic oligonucleotide
cauccaucauaaaccaggaga

SEQ ID NO: 2504 - RNA, 21 nt, Artificial Sequence
  Description of Artificial Sequence: Synthetic oligonucleotide
auccaucauaaaccaggagga

SEQ ID NO: 2505 - RNA, 21 nt, Artificial Sequence
  Description of Artificial Sequence: Synthetic oligonucleotide
uccaucauaaaccaggaggua

SEQ ID NO: 2506 - RNA, 21 nt, Artificial Sequence
  Description of Artificial Sequence: Synthetic oligonucleotide
ccaucauaaaccaggagguga

SEQ ID NO: 2507 - RNA, 21 nt, Artificial Sequence
  Description of Artificial Sequence: Synthetic oligonucleotide
caucauaaaccaggaggugga

SEQ ID NO: 2508 - RNA, 21 nt, Artificial Sequence
  Description of Artificial Sequence: Synthetic oligonucleotide
aucauaaaccaggagguggca

SEQ ID NO: 2509 - RNA, 21 nt, Artificial Sequence
  Description of Artificial Sequence: Synthetic oligonucleotide
ucauaaaccaggagguggcca

SEQ ID NO: 2510 - RNA, 21 nt, Artificial Sequence
  Description of Artificial Sequence: Synthetic oligonucleotide
cauaaaccaggagguggccaa

SEQ ID NO: 2511 - RNA, 21 nt, Artificial Sequence
  Description of Artificial Sequence: Synthetic oligonucleotide
auaaaccaggagguggccaga

SEQ ID NO: 2512 - RNA, 21 nt, Artificial Sequence
  Description of Artificial Sequence: Synthetic oligonucleotide
uaaaccaggagguggccagga

SEQ ID NO: 2513 - RNA, 21 nt, Artificial Sequence
  Description of Artificial Sequence: Synthetic oligonucleotide
aaaccaggagguggccaggua

SEQ ID NO: 2514 - RNA, 21 nt, Artificial Sequence
  Description of Artificial Sequence: Synthetic oligonucleotide
aaccaggagguggccagguga

SEQ ID NO: 2515 - RNA, 21 nt, Artificial Sequence
  Description of Artificial Sequence: Synthetic oligonucleotide
accaggagguggccaggugga

SEQ ID NO: 2516 - RNA, 21 nt, Artificial Sequence
  Description of Artificial Sequence: Synthetic oligonucleotide
ccaggagguggccagguggaa

SEQ ID NO: 2517 - RNA, 21 nt, Artificial Sequence
  Description of Artificial Sequence: Synthetic oligonucleotide
caggagguggccagguggaaa

SEQ ID NO: 2518 - RNA, 21 nt, Artificial Sequence
  Description of Artificial Sequence: Synthetic oligonucleotide
aggagguggccagguggaaga

SEQ ID NO: 2519 - RNA, 21 nt, Artificial Sequence
  Description of Artificial Sequence: Synthetic oligonucleotide
ggagguggccagguggaagua

SEQ ID NO: 2520 - RNA, 21 nt, Artificial Sequence
  Description of Artificial Sequence: Synthetic oligonucleotide
gagguggccagguggaaguaa

SEQ ID NO: 2521 - DNA, 23 bp, Artificial Sequence
  Description of Artificial Sequence: Synthetic oligonucleotide
  Description of Combined DNA/RNA Molecule: Synthetic oligonucleotide
ucaugcgagcutgggucacguga

SEQ ID NO: 2522 - DNA, 23 bp, Artificial Sequence
  Description of Artificial Sequence: Synthetic oligonucleotide
  Description of Combined DNA/RNA Molecule: Synthetic oligonucleotide
uccatgcgagcuugggucacgug

SEQ ID NO: 2523 - RNA, 23 nt, Artificial Sequence
  Description of Artificial Sequence: Synthetic oligonucleotide
uaccaugcgagcuugggucacgu

SEQ ID NO: 2524 - DNA, 23 bp, Artificial Sequence
  Description of Artificial Sequence: Synthetic oligonucleotide
  Description of Combined DNA/RNA Molecule: Synthetic oligonucleotide
ugaccatgcgagcuugggucacg

SEQ ID NO: 2525 - RNA, 23 nt, Artificial Sequence
  Description of Artificial Sequence: Synthetic oligonucleotide
uugaccaugcgagcuugggucac

SEQ ID NO: 2526 - RNA, 23 nt, Artificial Sequence
  Description of Artificial Sequence: Synthetic oligonucleotide
ucugaccaugcgagcuuggguca

SEQ ID NO: 2527 - RNA, 23 nt, Artificial Sequence
  Description of Artificial Sequence: Synthetic oligonucleotide
uacugaccaugcgagcuuggguc

SEQ ID NO: 2528 - DNA, 23 bp, Artificial Sequence
  Description of Artificial Sequence: Synthetic oligonucleotide
  Description of Combined DNA/RNA Molecule: Synthetic oligonucleotide
uuactgaccaugcgagcuugggu

SEQ ID NO: 2529 - RNA, 23 nt, Artificial Sequence
  Description of Artificial Sequence: Synthetic oligonucleotide
uuuacugaccaugcgagcuuggg

SEQ ID NO: 2530 - DNA, 23 bp, Artificial Sequence
  Description of Artificial Sequence: Synthetic oligonucleotide
  Description of Combined DNA/RNA Molecule: Synthetic oligonucleotide
uuuuactgaccaugcgagcuugg

SEQ ID NO: 2531 - DNA, 23 bp, Artificial Sequence
  Description of Artificial Sequence: Synthetic oligonucleotide
  Description of Combined DNA/RNA Molecule: Synthetic oligonucleotide
uuuutacugaccaugcgagcuug

SEQ ID NO: 2532 - DNA, 23 bp, Artificial Sequence
  Description of Artificial Sequence: Synthetic oligonucleotide
  Description of Combined DNA/RNA Molecule: Synthetic oligonucleotide
ucuutuacugaccaugcgagcuu

SEQ ID NO: 2533 - DNA, 23 bp, Artificial Sequence
  Description of Artificial Sequence: Synthetic oligonucleotide
  Description of Combined DNA/RNA Molecule: Synthetic oligonucleotide
ugcututacugaccaugcgagcu

SEQ ID NO: 2534 - DNA, 23 bp, Artificial Sequence
  Description of Artificial Sequence: Synthetic oligonucleotide
  Description of Combined DNA/RNA Molecule: Synthetic oligonucleotide
uugctutuacugaccaugcgagc

SEQ ID NO: 2535 - DNA, 23 bp, Artificial Sequence
  Description of Artificial Sequence: Synthetic oligonucleotide
  Description of Combined DNA/RNA Molecule: Synthetic oligonucleotide
uuugcutuuacugaccaugcgag

SEQ ID NO: 2536 - DNA, 23 bp, Artificial Sequence
  Description of Artificial Sequence: Synthetic oligonucleotide
  Description of Combined DNA/RNA Molecule: Synthetic oligonucleotide
uuuugctuuuacugaccaugcga

SEQ ID NO: 2537 - DNA, 23 bp, Artificial Sequence
  Description of Artificial Sequence: Synthetic oligonucleotide
  Description of Combined DNA/RNA Molecule: Synthetic oligonucleotide
ucuutgcuuuuacugaccaugcg

SEQ ID NO: 2538 - DNA, 23 bp, Artificial Sequence
  Description of Artificial Sequence: Synthetic oligonucleotide
  Description of Combined DNA/RNA Molecule: Synthetic oligonucleotide
uucutugcuuuuacugaccaugc

SEQ ID NO: 2539 - DNA, 23 bp, Artificial Sequence
  Description of Artificial Sequence: Synthetic oligonucleotide
  Description of Combined DNA/RNA Molecule: Synthetic oligonucleotide
uguctutgcuuuuacugaccaug

SEQ ID NO: 2540 - DNA, 23 bp, Artificial Sequence
  Description of Artificial Sequence: Synthetic oligonucleotide
  Description of Combined DNA/RNA Molecule: Synthetic oligonucleotide
ucgucutugcuuuuacugaccau

SEQ ID NO: 2541 - DNA, 23 bp, Artificial Sequence
  Description of Artificial Sequence: Synthetic oligonucleotide
  Description of Combined DNA/RNA Molecule: Synthetic oligonucleotide
uccgtctuugctuuuacugacca

SEQ ID NO: 2542 - RNA, 23 nt, Artificial Sequence
  Description of Artificial Sequence: Synthetic oligonucleotide
ucccgucuuugcuuuuacugacc

SEQ ID NO: 2543 - DNA, 23 bp, Artificial Sequence
  Description of Artificial Sequence: Synthetic oligonucleotide
  Description of Combined DNA/RNA Molecule: Synthetic oligonucleotide
utcccgtcuuugcuuuuacugac

SEQ ID NO: 2544 - RNA, 23 nt, Artificial Sequence
  Description of Artificial Sequence: Synthetic oligonucleotide
ugucccgucuuugcuuuuacuga

SEQ ID NO: 2545 - RNA, 23 nt, Artificial Sequence
  Description of Artificial Sequence: Synthetic oligonucleotide
uagucccgucuuugcuuuuacug

SEQ ID NO: 2546 - DNA, 23 bp, Artificial Sequence
  Description of Artificial Sequence: Synthetic oligonucleotide
  Description of Combined DNA/RNA Molecule: Synthetic oligonucleotide
ucgggacgugutugauauuaucc

SEQ ID NO: 2547 - RNA, 23 nt, Artificial Sequence
  Description of Artificial Sequence: Synthetic oligonucleotide
uccgggacguguuugauauuauc

SEQ ID NO: 2548 - RNA, 23 nt, Artificial Sequence
  Description of Artificial Sequence: Synthetic oligonucleotide
ucccgggacguguuugauauuau

SEQ ID NO: 2549 - RNA, 23 nt, Artificial Sequence
  Description of Artificial Sequence: Synthetic oligonucleotide
uucccgggacguguuugauauua

SEQ ID NO: 2550 - RNA, 23 nt, Artificial Sequence
  Description of Artificial Sequence: Synthetic oligonucleotide
ucucccgggacguguuugauauu

SEQ ID NO: 2551 - RNA, 23 nt, Artificial Sequence
  Description of Artificial Sequence: Synthetic oligonucleotide
uccucccgggacguguuugauau

SEQ ID NO: 2552 - DNA, 23 bp, Artificial Sequence
  Description of Artificial Sequence: Synthetic oligonucleotide
  Description of Combined DNA/RNA Molecule: Synthetic oligonucleotide
ugcctcccgggacguguuugaua

SEQ ID NO: 2553 - RNA, 23 nt, Artificial Sequence
  Description of Artificial Sequence: Synthetic oligonucleotide
ucgccucccgggacguguuugau

SEQ ID NO: 2554 - DNA, 23 bp, Artificial Sequence
  Description of Artificial Sequence: Synthetic oligonucleotide
  Description of Combined DNA/RNA Molecule: Synthetic oligonucleotide
uccgcctcccgggacguguuuga

SEQ ID NO: 2555 - RNA, 23 nt, Artificial Sequence
  Description of Artificial Sequence: Synthetic oligonucleotide
ugccgccucccgggacguguuug

SEQ ID NO: 2556 - RNA, 23 nt, Artificial Sequence
  Description of Artificial Sequence: Synthetic oligonucleotide
uugccgccucccgggacguguuu

SEQ ID NO: 2557 - RNA, 23 nt, Artificial Sequence
  Description of Artificial Sequence: Synthetic oligonucleotide
ucugccgccucccgggacguguu

SEQ ID NO: 2558 - RNA, 23 nt, Artificial Sequence
  Description of Artificial Sequence: Synthetic oligonucleotide
uacugccgccucccgggacgugu

SEQ ID NO: 2559 - DNA, 23 bp, Artificial Sequence
  Description of Artificial Sequence: Synthetic oligonucleotide
  Description of Combined DNA/RNA Molecule: Synthetic oligonucleotide
ucactgccgccucccgggacgug

SEQ ID NO: 2560 - RNA, 23 nt, Artificial Sequence
  Description of Artificial Sequence: Synthetic oligonucleotide
uacacugccgccucccgggacgu

SEQ ID NO: 2561 - DNA, 23 bp, Artificial Sequence
  Description of Artificial Sequence: Synthetic oligonucleotide
  Description of Combined DNA/RNA Molecule: Synthetic oligonucleotide
ucacactgccgccucccgggacg

SEQ ID NO: 2562 - RNA, 23 nt, Artificial Sequence
  Description of Artificial Sequence: Synthetic oligonucleotide
ugcacacugccgccucccgggac

SEQ ID NO: 2563 - RNA, 23 nt, Artificial Sequence
  Description of Artificial Sequence: Synthetic oligonucleotide
uugcacacugccgccucccggga

SEQ ID NO: 2564 - RNA, 23 nt, Artificial Sequence
  Description of Artificial Sequence: Synthetic oligonucleotide
uuugcacacugccgccucccggg

SEQ ID NO: 2565 - RNA, 23 nt, Artificial Sequence
  Description of Artificial Sequence: Synthetic oligonucleotide
uuuugcacacugccgccucccgg

SEQ ID NO: 2566 - DNA, 23 bp, Artificial Sequence
  Description of Artificial Sequence: Synthetic oligonucleotide
  Description of Combined DNA/RNA Molecule: Synthetic oligonucleotide
uauutgcacacugccgccucccg

SEQ ID NO: 2567 - RNA, 23 nt, Artificial Sequence
  Description of Artificial Sequence: Synthetic oligonucleotide
uuguagacuauuugcacacugcc

SEQ ID NO: 2568 - DNA, 23 bp, Artificial Sequence
  Description of Artificial Sequence: Synthetic oligonucleotide
  Description of Combined DNA/RNA Molecule: Synthetic oligonucleotide
uuugtagacuauuugcacacugc

SEQ ID NO: 2569 - RNA, 23 nt, Artificial Sequence
  Description of Artificial Sequence: Synthetic oligonucleotide
uuuuguagacuauuugcacacug

SEQ ID NO: 2570 - DNA, 23 bp, Artificial Sequence
  Description of Artificial Sequence: Synthetic oligonucleotide
  Description of Combined DNA/RNA Molecule: Synthetic oligonucleotide
uguutgtagacuauuugcacacu

SEQ ID NO: 2571 - DNA, 23 bp, Artificial Sequence
  Description of Artificial Sequence: Synthetic oligonucleotide
  Description of Combined DNA/RNA Molecule: Synthetic oligonucleotide
uggutuguagacuauuugcacac

SEQ ID NO: 2572 - DNA, 23 bp, Artificial Sequence
  Description of Artificial Sequence: Synthetic oligonucleotide
  Description of Combined DNA/RNA Molecule: Synthetic oligonucleotide
uuggtutguagacuauuugcaca

SEQ ID NO: 2573 - DNA, 23 bp, Artificial Sequence
  Description of Artificial Sequence: Synthetic oligonucleotide
  Description of Combined DNA/RNA Molecule: Synthetic oligonucleotide
ucuggutuguagacuauuugcac

SEQ ID NO: 2574 - DNA, 23 bp, Artificial Sequence
  Description of Artificial Sequence: Synthetic oligonucleotide
  Description of Combined DNA/RNA Molecule: Synthetic oligonucleotide
uacuggtuuguagacuauuugca

SEQ ID NO: 2575 - DNA, 23 bp, Artificial Sequence
  Description of Artificial Sequence: Synthetic oligonucleotide
  Description of Combined DNA/RNA Molecule: Synthetic oligonucleotide
uaactgguuuguagacuauuugc

SEQ ID NO: 2576 - RNA, 23 nt, Artificial Sequence
  Description of Artificial Sequence: Synthetic oligonucleotide
ucaacugguuuguagacuauuug

SEQ ID NO: 2577 - DNA, 23 bp, Artificial Sequence
  Description of Artificial Sequence: Synthetic oligonucleotide
  Description of Combined DNA/RNA Molecule: Synthetic oligonucleotide
uucaactgguuuguagacuauuu

SEQ ID NO: 2578 - DNA, 23 bp, Artificial Sequence
  Description of Artificial Sequence: Synthetic oligonucleotide
  Description of Combined DNA/RNA Molecule: Synthetic oligonucleotide
ugucaacuggutuguagacuauu

SEQ ID NO: 2579 - RNA, 23 nt, Artificial Sequence
  Description of Artificial Sequence: Synthetic oligonucleotide
uggucaacugguuuguagacuau

SEQ ID NO: 2580 - DNA, 23 bp, Artificial Sequence
  Description of Artificial Sequence: Synthetic oligonucleotide
  Description of Combined DNA/RNA Molecule: Synthetic oligonucleotide
uaggtcaacugguuuguagacua

SEQ ID NO: 2581 - RNA, 23 nt, Artificial Sequence
  Description of Artificial Sequence: Synthetic oligonucleotide
ucaggucaacugguuuguagacu

SEQ ID NO: 2582 - DNA, 23 bp, Artificial Sequence
  Description of Artificial Sequence: Synthetic oligonucleotide
  Description of Combined DNA/RNA Molecule: Synthetic oligonucleotide
uucaggtcaacugguuuguagac

SEQ ID NO: 2583 - RNA, 23 nt, Artificial Sequence
  Description of Artificial Sequence: Synthetic oligonucleotide
ucucaggucaacugguuuguaga

SEQ ID NO: 2584 - RNA, 23 nt, Artificial Sequence
  Description of Artificial Sequence: Synthetic oligonucleotide
ugcucaggucaacugguuuguag

SEQ ID NO: 2585 - DNA, 23 bp, Artificial Sequence
  Description of Artificial Sequence: Synthetic oligonucleotide
  Description of Combined DNA/RNA Molecule: Synthetic oligonucleotide
uugctcaggucaacugguuugua

SEQ ID NO: 2586 - RNA, 23 nt, Artificial Sequence
  Description of Artificial Sequence: Synthetic oligonucleotide
uuugcucaggucaacugguuugu

SEQ ID NO: 2587 - DNA, 23 bp, Artificial Sequence
  Description of Artificial Sequence: Synthetic oligonucleotide
  Description of Combined DNA/RNA Molecule: Synthetic oligonucleotide
ucuugctcaggucaacugguuug

SEQ ID NO: 2588 - DNA, 23 bp, Artificial Sequence
  Description of Artificial Sequence: Synthetic oligonucleotide
  Description of Combined DNA/RNA Molecule: Synthetic oligonucleotide
ucuggutuaugauggauguugcc

SEQ ID NO: 2589 - DNA, 23 bp, Artificial Sequence
  Description of Artificial Sequence: Synthetic oligonucleotide
  Description of Combined DNA/RNA Molecule: Synthetic oligonucleotide
uccuggtuuaugauggauguugc

SEQ ID NO: 2590 - DNA, 23 bp, Artificial Sequence
  Description of Artificial Sequence: Synthetic oligonucleotide
  Description of Combined DNA/RNA Molecule: Synthetic oligonucleotide
uucctgguuuaugauggauguug

SEQ ID NO: 2591 - RNA, 23 nt, Artificial Sequence
  Description of Artificial Sequence: Synthetic oligonucleotide
ucuccugguuuaugauggauguu

SEQ ID NO: 2592 - DNA, 23 bp, Artificial Sequence
  Description of Artificial Sequence: Synthetic oligonucleotide
  Description of Combined DNA/RNA Molecule: Synthetic oligonucleotide
uccucctgguutaugauggaugu

SEQ ID NO: 2593 - DNA, 23 bp, Artificial Sequence
  Description of Artificial Sequence: Synthetic oligonucleotide
  Description of Combined DNA/RNA Molecule: Synthetic oligonucleotide
uacctccugguuuaugauggaug

SEQ ID NO: 2594 - DNA, 23 bp, Artificial Sequence
  Description of Artificial Sequence: Synthetic oligonucleotide
  Description of Combined DNA/RNA Molecule: Synthetic oligonucleotide
ucaccuccuggtuuaugauggau

SEQ ID NO: 2595 - DNA, 23 bp, Artificial Sequence
  Description of Artificial Sequence: Synthetic oligonucleotide
  Description of Combined DNA/RNA Molecule: Synthetic oligonucleotide
uccacctccugguuuaugaugga

SEQ ID NO: 2596 - RNA, 23 nt, Artificial Sequence
  Description of Artificial Sequence: Synthetic oligonucleotide
ugccaccuccugguuuaugaugg

SEQ ID NO: 2597 - RNA, 23 nt, Artificial Sequence
  Description of Artificial Sequence: Synthetic oligonucleotide
uggccaccuccugguuuaugaug

SEQ ID NO: 2598 - RNA, 23 nt, Artificial Sequence
  Description of Artificial Sequence: Synthetic oligonucleotide
uuggccaccuccugguuuaugau

SEQ ID NO: 2599 - RNA, 23 nt, Artificial Sequence
  Description of Artificial Sequence: Synthetic oligonucleotide
ucuggccaccuccugguuuauga

SEQ ID NO: 2600 - RNA, 23 nt, Artificial Sequence
  Description of Artificial Sequence: Synthetic oligonucleotide
uccuggccaccuccugguuuaug

SEQ ID NO: 2601 - DNA, 23 bp, Artificial Sequence
  Description of Artificial Sequence: Synthetic oligonucleotide
  Description of Combined DNA/RNA Molecule: Synthetic oligonucleotide
uacctggccaccuccugguuuau

SEQ ID NO: 2602 - RNA, 23 nt, Artificial Sequence
  Description of Artificial Sequence: Synthetic oligonucleotide
ucaccuggccaccuccugguuua

SEQ ID NO: 2603 - DNA, 23 bp, Artificial Sequence
  Description of Artificial Sequence: Synthetic oligonucleotide
  Description of Combined DNA/RNA Molecule: Synthetic oligonucleotide
uccacctggccaccuccugguuu

SEQ ID NO: 2604 - RNA, 23 nt, Artificial Sequence
  Description of Artificial Sequence: Synthetic oligonucleotide
uuccaccuggccaccuccugguu

SEQ ID NO: 2605 - RNA, 23 nt, Artificial Sequence
  Description of Artificial Sequence: Synthetic oligonucleotide
uuuccaccuggccaccuccuggu

SEQ ID NO: 2606 - RNA, 23 nt, Artificial Sequence
  Description of Artificial Sequence: Synthetic oligonucleotide
ucuuccaccuggccaccuccugg

SEQ ID NO: 2607 - DNA, 23 bp, Artificial Sequence
  Description of Artificial Sequence: Synthetic oligonucleotide
  Description of Combined DNA/RNA Molecule: Synthetic oligonucleotide
uacutccaccuggccaccuccug

SEQ ID NO: 2608 - DNA, 23 bp, Artificial Sequence
  Description of Artificial Sequence: Synthetic oligonucleotide
  Description of Combined DNA/RNA Molecule: Synthetic oligonucleotide
uuactuccaccuggccaccuccu

SEQ ID NO: 2609 - RNA, 21 nt, Artificial Sequence
  Description of Artificial Sequence: Synthetic oligonucleotide
acgugacccaagcucgcauga

SEQ ID NO: 2610 - RNA, 21 nt, Artificial Sequence
  Description of Artificial Sequence: Synthetic oligonucleotide
cgugacccaagcucgcaugga

SEQ ID NO: 2611 - RNA, 21 nt, Artificial Sequence
  Description of Artificial Sequence: Synthetic oligonucleotide
gugacccaagcucgcauggua

SEQ ID NO: 2612 - RNA, 21 nt, Artificial Sequence
  Description of Artificial Sequence: Synthetic oligonucleotide
ugacccaagcucgcaugguca

SEQ ID NO: 2613 - RNA, 21 nt, Artificial Sequence
  Description of Artificial Sequence: Synthetic oligonucleotide
gacccaagcucgcauggucaa

SEQ ID NO: 2614 - RNA, 21 nt, Artificial Sequence
  Description of Artificial Sequence: Synthetic oligonucleotide
acccaagcucgcauggucaga

SEQ ID NO: 2615 - RNA, 21 nt, Artificial Sequence
  Description of Artificial Sequence: Synthetic oligonucleotide
cccaagcucgcauggucagua

SEQ ID NO: 2616 - RNA, 21 nt, Artificial Sequence
  Description of Artificial Sequence: Synthetic oligonucleotide
ccaagcucgcauggucaguaa

SEQ ID NO: 2617 - RNA, 21 nt, Artificial Sequence
  Description of Artificial Sequence: Synthetic oligonucleotide
caagcucgcauggucaguaaa

SEQ ID NO: 2618 - RNA, 21 nt, Artificial Sequence
  Description of Artificial Sequence: Synthetic oligonucleotide
aagcucgcauggucaguaaaa

SEQ ID NO: 2619 - RNA, 21 nt, Artificial Sequence
  Description of Artificial Sequence: Synthetic oligonucleotide
agcucgcauggucaguaaaaa

SEQ ID NO: 2620 - RNA, 21 nt, Artificial Sequence
  Description of Artificial Sequence: Synthetic oligonucleotide
gcucgcauggucaguaaaaga

SEQ ID NO: 2621 - RNA, 21 nt, Artificial Sequence
  Description of Artificial Sequence: Synthetic oligonucleotide
cucgcauggucaguaaaagca

SEQ ID NO: 2622 - RNA, 21 nt, Artificial Sequence
  Description of Artificial Sequence: Synthetic oligonucleotide
ucgcauggucaguaaaagcaa

SEQ ID NO: 2623 - RNA, 21 nt, Artificial Sequence
  Description of Artificial Sequence: Synthetic oligonucleotide
cgcauggucaguaaaagcaaa

SEQ ID NO: 2624 - RNA, 21 nt, Artificial Sequence
  Description of Artificial Sequence: Synthetic oligonucleotide
gcauggucaguaaaagcaaaa

SEQ ID NO: 2625 - RNA, 21 nt, Artificial Sequence
  Description of Artificial Sequence: Synthetic oligonucleotide
cauggucaguaaaagcaaaga

SEQ ID NO: 2626 - RNA, 21 nt, Artificial Sequence
  Description of Artificial Sequence: Synthetic oligonucleotide
auggucaguaaaagcaaagaa

SEQ ID NO: 2627 - RNA, 21 nt, Artificial Sequence
  Description of Artificial Sequence: Synthetic oligonucleotide
uggucaguaaaagcaaagaca

SEQ ID NO: 2628 - RNA, 21 nt, Artificial Sequence
  Description of Artificial Sequence: Synthetic oligonucleotide
ggucaguaaaagcaaagacga

SEQ ID NO: 2629 - RNA, 21 nt, Artificial Sequence
  Description of Artificial Sequence: Synthetic oligonucleotide
gucaguaaaagcaaagacgga

SEQ ID NO: 2630 - RNA, 21 nt, Artificial Sequence
  Description of Artificial Sequence: Synthetic oligonucleotide
ucaguaaaagcaaagacggga

SEQ ID NO: 2631 - RNA, 21 nt, Artificial Sequence
  Description of Artificial Sequence: Synthetic oligonucleotide
caguaaaagcaaagacgggaa

SEQ ID NO: 2632 - RNA, 21 nt, Artificial Sequence
  Description of Artificial Sequence: Synthetic oligonucleotide
aguaaaagcaaagacgggaca

SEQ ID NO: 2633 - RNA, 21 nt, Artificial Sequence
  Description of Artificial Sequence: Synthetic oligonucleotide
guaaaagcaaagacgggacua

SEQ ID NO: 2634 - RNA, 21 nt, Artificial Sequence
  Description of Artificial Sequence: Synthetic oligonucleotide
auaauaucaaacacgucccga

SEQ ID NO: 2635 - RNA, 21 nt, Artificial Sequence
  Description of Artificial Sequence: Synthetic oligonucleotide
uaauaucaaacacgucccgga

SEQ ID NO: 2636 - RNA, 21 nt, Artificial Sequence
  Description of Artificial Sequence: Synthetic oligonucleotide
aauaucaaacacgucccggga

SEQ ID NO: 2637 - RNA, 21 nt, Artificial Sequence
  Description of Artificial Sequence: Synthetic oligonucleotide
auaucaaacacgucccgggaa

SEQ ID NO: 2638 - RNA, 21 nt, Artificial Sequence
  Description of Artificial Sequence: Synthetic oligonucleotide
uaucaaacacgucccgggaga

SEQ ID NO: 2639 - RNA, 21 nt, Artificial Sequence
  Description of Artificial Sequence: Synthetic oligonucleotide
aucaaacacgucccgggagga

SEQ ID NO: 2640 - RNA, 21 nt, Artificial Sequence
  Description of Artificial Sequence: Synthetic oligonucleotide
ucaaacacgucccgggaggca

SEQ ID NO: 2641 - RNA, 21 nt, Artificial Sequence
  Description of Artificial Sequence: Synthetic oligonucleotide
caaacacgucccgggaggcga

SEQ ID NO: 2642 - RNA, 21 nt, Artificial Sequence
  Description of Artificial Sequence: Synthetic oligonucleotide
aaacacgucccgggaggcgga

SEQ ID NO: 2643 - RNA, 21 nt, Artificial Sequence
  Description of Artificial Sequence: Synthetic oligonucleotide
aacacgucccgggaggcggca

SEQ ID NO: 2644 - RNA, 21 nt, Artificial Sequence
  Description of Artificial Sequence: Synthetic oligonucleotide
acacgucccgggaggcggcaa

SEQ ID NO: 2645 - RNA, 21 nt, Artificial Sequence
  Description of Artificial Sequence: Synthetic oligonucleotide
cacgucccgggaggcggcaga

SEQ ID NO: 2646 - RNA, 21 nt, Artificial Sequence
  Description of Artificial Sequence: Synthetic oligonucleotide
acgucccgggaggcggcagua

SEQ ID NO: 2647 - RNA, 21 nt, Artificial Sequence
  Description of Artificial Sequence: Synthetic oligonucleotide
cgucccgggaggcggcaguga

SEQ ID NO: 2648 - RNA, 21 nt, Artificial Sequence
  Description of Artificial Sequence: Synthetic oligonucleotide
gucccgggaggcggcagugua

SEQ ID NO: 2649 - RNA, 21 nt, Artificial Sequence
  Description of Artificial Sequence: Synthetic oligonucleotide
ucccgggaggcggcaguguga

SEQ ID NO: 2650 - RNA, 21 nt, Artificial Sequence
  Description of Artificial Sequence: Synthetic oligonucleotide
cccgggaggcggcagugugca

SEQ ID NO: 2651 - RNA, 21 nt, Artificial Sequence
  Description of Artificial Sequence: Synthetic oligonucleotide
ccgggaggcggcagugugcaa

SEQ ID NO: 2652 - RNA, 21 nt, Artificial Sequence
  Description of Artificial Sequence: Synthetic oligonucleotide
cgggaggcggcagugugcaaa

SEQ ID NO: 2653 - RNA, 21 nt, Artificial Sequence
  Description of Artificial Sequence: Synthetic oligonucleotide
gggaggcggcagugugcaaaa

SEQ ID NO: 2654 - RNA, 21 nt, Artificial Sequence
  Description of Artificial Sequence: Synthetic oligonucleotide
ggaggcggcagugugcaaaua

SEQ ID NO: 2655 - RNA, 21 nt, Artificial Sequence
  Description of Artificial Sequence: Synthetic oligonucleotide
cagugugcaaauagucuacaa

SEQ ID NO: 2656 - RNA, 21 nt, Artificial Sequence
  Description of Artificial Sequence: Synthetic oligonucleotide
agugugcaaauagucuacaaa

SEQ ID NO: 2657 - RNA, 21 nt, Artificial Sequence
  Description of Artificial Sequence: Synthetic oligonucleotide
gugugcaaauagucuacaaaa

SEQ ID NO: 2658 - RNA, 21 nt, Artificial Sequence
  Description of Artificial Sequence: Synthetic oligonucleotide
ugugcaaauagucuacaaaca

SEQ ID NO: 2659 - RNA, 21 nt, Artificial Sequence
  Description of Artificial Sequence: Synthetic oligonucleotide
gugcaaauagucuacaaacca

SEQ ID NO: 2660 - RNA, 21 nt, Artificial Sequence
  Description of Artificial Sequence: Synthetic oligonucleotide
ugcaaauagucuacaaaccaa

SEQ ID NO: 2661 - RNA, 21 nt, Artificial Sequence
  Description of Artificial Sequence: Synthetic oligonucleotide
gcaaauagucuacaaaccaga

SEQ ID NO: 2662 - RNA, 21 nt, Artificial Sequence
  Description of Artificial Sequence: Synthetic oligonucleotide
caaauagucuacaaaccagua

SEQ ID NO: 2663 - RNA, 21 nt, Artificial Sequence
  Description of Artificial Sequence: Synthetic oligonucleotide
aaauagucuacaaaccaguua

SEQ ID NO: 2664 - RNA, 21 nt, Artificial Sequence
  Description of Artificial Sequence: Synthetic oligonucleotide
aauagucuacaaaccaguuga

SEQ ID NO: 2665 - RNA, 21 nt, Artificial Sequence
  Description of Artificial Sequence: Synthetic oligonucleotide
auagucuacaaaccaguugaa

SEQ ID NO: 2666 - RNA, 21 nt, Artificial Sequence
  Description of Artificial Sequence: Synthetic oligonucleotide
uagucuacaaaccaguugaca

SEQ ID NO: 2667 - RNA, 21 nt, Artificial Sequence
  Description of Artificial Sequence: Synthetic oligonucleotide
agucuacaaaccaguugacca

SEQ ID NO: 2668 - RNA, 21 nt, Artificial Sequence
  Description of Artificial Sequence: Synthetic oligonucleotide
gucuacaaaccaguugaccua

SEQ ID NO: 2669 - RNA, 21 nt, Artificial Sequence
  Description of Artificial Sequence: Synthetic oligonucleotide
ucuacaaaccaguugaccuga

SEQ ID NO: 2670 - RNA, 21 nt, Artificial Sequence
  Description of Artificial Sequence: Synthetic oligonucleotide
cuacaaaccaguugaccugaa

SEQ ID NO: 2671 - RNA, 21 nt, Artificial Sequence
  Description of Artificial Sequence: Synthetic oligonucleotide
uacaaaccaguugaccugaga

SEQ ID NO: 2672 - RNA, 21 nt, Artificial Sequence
  Description of Artificial Sequence: Synthetic oligonucleotide
acaaaccaguugaccugagca

SEQ ID NO: 2673 - RNA, 21 nt, Artificial Sequence
  Description of Artificial Sequence: Synthetic oligonucleotide
caaaccaguugaccugagcaa

SEQ ID NO: 2674 - RNA, 21 nt, Artificial Sequence
  Description of Artificial Sequence: Synthetic oligonucleotide
aaaccaguugaccugagcaaa

SEQ ID NO: 2675 - RNA, 21 nt, Artificial Sequence
  Description of Artificial Sequence: Synthetic oligonucleotide
aaccaguugaccugagcaaga

SEQ ID NO: 2676 - RNA, 21 nt, Artificial Sequence
  Description of Artificial Sequence: Synthetic oligonucleotide
caacauccaucauaaaccaga

SEQ ID NO: 2677 - RNA, 21 nt, Artificial Sequence
  Description of Artificial Sequence: Synthetic oligonucleotide
aacauccaucauaaaccagga

SEQ ID NO: 2678 - RNA, 21 nt, Artificial Sequence
  Description of Artificial Sequence: Synthetic oligonucleotide
acauccaucauaaaccaggaa

SEQ ID NO: 2679 - RNA, 21 nt, Artificial Sequence
  Description of Artificial Sequence: Synthetic oligonucleotide
cauccaucauaaaccaggaga

SEQ ID NO: 2680 - RNA, 21 nt, Artificial Sequence
  Description of Artificial Sequence: Synthetic oligonucleotide
auccaucauaaaccaggagga

SEQ ID NO: 2681 - RNA, 21 nt, Artificial Sequence
  Description of Artificial Sequence: Synthetic oligonucleotide
uccaucauaaaccaggaggua

SEQ ID NO: 2682 - RNA, 21 nt, Artificial Sequence
  Description of Artificial Sequence: Synthetic oligonucleotide
ccaucauaaaccaggagguga

SEQ ID NO: 2683 - RNA, 21 nt, Artificial Sequence
  Description of Artificial Sequence: Synthetic oligonucleotide
caucauaaaccaggaggugga

SEQ ID NO: 2684 - RNA, 21 nt, Artificial Sequence
  Description of Artificial Sequence: Synthetic oligonucleotide
aucauaaaccaggagguggca

SEQ ID NO: 2685 - RNA, 21 nt, Artificial Sequence
  Description of Artificial Sequence: Synthetic oligonucleotide
ucauaaaccaggagguggcca

SEQ ID NO: 2686 - RNA, 21 nt, Artificial Sequence
  Description of Artificial Sequence: Synthetic oligonucleotide
cauaaaccaggagguggccaa

SEQ ID NO: 2687 - RNA, 21 nt, Artificial Sequence
  Description of Artificial Sequence: Synthetic oligonucleotide
auaaaccaggagguggccaga

SEQ ID NO: 2688 - RNA, 21 nt, Artificial Sequence
  Description of Artificial Sequence: Synthetic oligonucleotide
uaaaccaggagguggccagga

SEQ ID NO: 2689 - RNA, 21 nt, Artificial Sequence
  Description of Artificial Sequence: Synthetic oligonucleotide
aaaccaggagguggccaggua

SEQ ID NO: 2690 - RNA, 21 nt, Artificial Sequence
  Description of Artificial Sequence: Synthetic oligonucleotide
aaccaggagguggccagguga

SEQ ID NO: 2691 - RNA, 21 nt, Artificial Sequence
  Description of Artificial Sequence: Synthetic oligonucleotide
accaggagguggccaggugga

SEQ ID NO: 2692 - RNA, 21 nt, Artificial Sequence
  Description of Artificial Sequence: Synthetic oligonucleotide
ccaggagguggccagguggaa

SEQ ID NO: 2693 - RNA, 21 nt, Artificial Sequence
  Description of Artificial Sequence: Synthetic oligonucleotide
caggagguggccagguggaaa

SEQ ID NO: 2694 - RNA, 21 nt, Artificial Sequence
  Description of Artificial Sequence: Synthetic oligonucleotide
aggagguggccagguggaaga

SEQ ID NO: 2695 - RNA, 21 nt, Artificial Sequence
  Description of Artificial Sequence: Synthetic oligonucleotide
ggagguggccagguggaagua

SEQ ID NO: 2696 - RNA, 21 nt, Artificial Sequence
  Description of Artificial Sequence: Synthetic oligonucleotide
gagguggccagguggaaguaa

SEQ ID NO: 2697 - DNA, 23 bp, Artificial Sequence
  Description of Artificial Sequence: Synthetic oligonucleotide
  Description of Combined DNA/RNA Molecule: Synthetic oligonucleotide
ucaugcgagcutgggucacguga

SEQ ID NO: 2698 - DNA, 23 bp, Artificial Sequence
  Description of Artificial Sequence: Synthetic oligonucleotide
  Description of Combined DNA/RNA Molecule: Synthetic oligonucleotide
uccatgcgagcuugggucacgug

SEQ ID NO: 2699 - DNA, 23 bp, Artificial Sequence
  Description of Artificial Sequence: Synthetic oligonucleotide
  Description of Combined DNA/RNA Molecule: Synthetic oligonucleotide
uaccaugcgagcuugggucacgu

SEQ ID NO: 2700 - DNA, 23 bp, Artificial Sequence
  Description of Artificial Sequence: Synthetic oligonucleotide
  Description of Combined DNA/RNA Molecule: Synthetic oligonucleotide
ugaccatgcgagcuugggucacg

SEQ ID NO: 2701 - DNA, 23 bp, Artificial Sequence
  Description of Artificial Sequence: Synthetic oligonucleotide
  Description of Combined DNA/RNA Molecule: Synthetic oligonucleotide
uugaccaugcgagcuugggucac

SEQ ID NO: 2702 - DNA, 23 bp, Artificial Sequence
  Description of Artificial Sequence: Synthetic oligonucleotide
  Description of Combined DNA/RNA Molecule: Synthetic oligonucleotide
ucugaccaugcgagcuuggguca

SEQ ID NO: 2703 - DNA, 23 bp, Artificial Sequence
  Description of Artificial Sequence: Synthetic oligonucleotide
  Description of Combined DNA/RNA Molecule: Synthetic oligonucleotide
uacugaccaugcgagcuuggguc

SEQ ID NO: 2704 - DNA, 23 bp, Artificial Sequence
  Description of Artificial Sequence: Synthetic oligonucleotide
  Description of Combined DNA/RNA Molecule: Synthetic oligonucleotide
uuactgaccaugcgagcuugggu

SEQ ID NO: 2705 - DNA, 23 bp, Artificial Sequence
  Description of Artificial Sequence: Synthetic oligonucleotide
  Description of Combined DNA/RNA Molecule: Synthetic oligonucleotide
uuuacugaccaugcgagcuuggg

SEQ ID NO: 2706 - DNA, 23 bp, Artificial Sequence
  Description of Artificial Sequence: Synthetic oligonucleotide
  Description of Combined DNA/RNA Molecule: Synthetic oligonucleotide
uuuuactgaccaugcgagcuugg

SEQ ID NO: 2707 - DNA, 23 bp, Artificial Sequence
  Description of Artificial Sequence: Synthetic oligonucleotide
  Description of Combined DNA/RNA Molecule: Synthetic oligonucleotide
uuuutacugaccaugcgagcuug

SEQ ID NO: 2708 - DNA, 23 bp, Artificial Sequence
  Description of Artificial Sequence: Synthetic oligonucleotide
  Description of Combined DNA/RNA Molecule: Synthetic oligonucleotide
ucuutuacugaccaugcgagcuu

SEQ ID NO: 2709 - DNA, 23 bp, Artificial Sequence
  Description of Artificial Sequence: Synthetic oligonucleotide
  Description of Combined DNA/RNA Molecule: Synthetic oligonucleotide
ugcututacugaccaugcgagcu

SEQ ID NO: 2710 - DNA, 23 bp, Artificial Sequence
  Description of Artificial Sequence: Synthetic oligonucleotide
  Description of Combined DNA/RNA Molecule: Synthetic oligonucleotide
uugctutuacugaccaugcgagc

SEQ ID NO: 2711 - DNA, 23 bp, Artificial Sequence
  Description of Artificial Sequence: Synthetic oligonucleotide
  Description of Combined DNA/RNA Molecule: Synthetic oligonucleotide
uuugcutuuacugaccaugcgag

SEQ ID NO: 2712 - DNA, 23 bp, Artificial Sequence
  Description of Artificial Sequence: Synthetic oligonucleotide
  Description of Combined DNA/RNA Molecule: Synthetic oligonucleotide
uuuugctuuuacugaccaugcga

SEQ ID NO: 2713 - DNA, 23 bp, Artificial Sequence
  Description of Artificial Sequence: Synthetic oligonucleotide
  Description of Combined DNA/RNA Molecule: Synthetic oligonucleotide
ucuutgcuuuuacugaccaugcg

SEQ ID NO: 2714 - DNA, 23 bp, Artificial Sequence
  Description of Artificial Sequence: Synthetic oligonucleotide
  Description of Combined DNA/RNA Molecule: Synthetic oligonucleotide
uucutugcuuuuacugaccaugc

SEQ ID NO: 2715 - DNA, 23 bp, Artificial Sequence
  Description of Artificial Sequence: Synthetic oligonucleotide
  Description of Combined DNA/RNA Molecule: Synthetic oligonucleotide
uguctutgcuuuuacugaccaug

SEQ ID NO: 2716 - DNA, 23 bp, Artificial Sequence
  Description of Artificial Sequence: Synthetic oligonucleotide
  Description of Combined DNA/RNA Molecule: Synthetic oligonucleotide
ucgucutugcuuuuacugaccau

SEQ ID NO: 2717 - DNA, 23 bp, Artificial Sequence
  Description of Artificial Sequence: Synthetic oligonucleotide
  Description of Combined DNA/RNA Molecule: Synthetic oligonucleotide
uccgtctuugctuuuacugacca

SEQ ID NO: 2718 - DNA, 23 bp, Artificial Sequence
  Description of Artificial Sequence: Synthetic oligonucleotide
  Description of Combined DNA/RNA Molecule: Synthetic oligonucleotide
ucccgucuuugcuuuuacugacc

SEQ ID NO: 2719 - DNA, 23 bp, Artificial Sequence
  Description of Artificial Sequence: Synthetic oligonucleotide
  Description of Combined DNA/RNA Molecule: Synthetic oligonucleotide
utcccgtcuuugcuuuuacugac

SEQ ID NO: 2720 - DNA, 23 bp, Artificial Sequence
  Description of Artificial Sequence: Synthetic oligonucleotide
  Description of Combined DNA/RNA Molecule: Synthetic oligonucleotide
ugucccgucuuugcuuuuacuga

SEQ ID NO: 2721 - DNA, 23 bp, Artificial Sequence
  Description of Artificial Sequence: Synthetic oligonucleotide
  Description of Combined DNA/RNA Molecule: Synthetic oligonucleotide
uagucccgucuuugcuuuuacug

SEQ ID NO: 2722 - DNA, 23 bp, Artificial Sequence
  Description of Artificial Sequence: Synthetic oligonucleotide
  Description of Combined DNA/RNA Molecule: Synthetic oligonucleotide
ucgggacgugutugauauuaucc

SEQ ID NO: 2723 - DNA, 23 bp, Artificial Sequence
  Description of Artificial Sequence: Synthetic oligonucleotide
  Description of Combined DNA/RNA Molecule: Synthetic oligonucleotide
uccgggacguguuugauauuauc

SEQ ID NO: 2724 - DNA, 23 bp, Artificial Sequence
  Description of Artificial Sequence: Synthetic oligonucleotide
  Description of Combined DNA/RNA Molecule: Synthetic oligonucleotide
ucccgggacguguuugauauuau

SEQ ID NO: 2725 - DNA, 23 bp, Artificial Sequence
  Description of Artificial Sequence: Synthetic oligonucleotide
  Description of Combined DNA/RNA Molecule: Synthetic oligonucleotide
uucccgggacguguuugauauua

SEQ ID NO: 2726 - DNA, 23 bp, Artificial Sequence
  Description of Artificial Sequence: Synthetic oligonucleotide
  Description of Combined DNA/RNA Molecule: Synthetic oligonucleotide
ucucccgggacguguuugauauu

SEQ ID NO: 2727 - DNA, 23 bp, Artificial Sequence
  Description of Artificial Sequence: Synthetic oligonucleotide
  Description of Combined DNA/RNA Molecule: Synthetic oligonucleotide
uccucccgggacguguuugauau

SEQ ID NO: 2728 - DNA, 23 bp, Artificial Sequence
  Description of Artificial Sequence: Synthetic oligonucleotide
  Description of Combined DNA/RNA Molecule: Synthetic oligonucleotide
ugcctcccgggacguguuugaua

SEQ ID NO: 2729 - DNA, 23 bp, Artificial Sequence
  Description of Artificial Sequence: Synthetic oligonucleotide
  Description of Combined DNA/RNA Molecule: Synthetic oligonucleotide
ucgccucccgggacguguuugau

SEQ ID NO: 2730 - DNA, 23 bp, Artificial Sequence
  Description of Artificial Sequence: Synthetic oligonucleotide
  Description of Combined DNA/RNA Molecule: Synthetic oligonucleotide
uccgcctcccgggacguguuuga

SEQ ID NO: 2731 - DNA, 23 bp, Artificial Sequence
  Description of Artificial Sequence: Synthetic oligonucleotide
  Description of Combined DNA/RNA Molecule: Synthetic oligonucleotide
ugccgccucccgggacguguuug

SEQ ID NO: 2732 - DNA, 23 bp, Artificial Sequence
  Description of Artificial Sequence: Synthetic oligonucleotide
  Description of Combined DNA/RNA Molecule: Synthetic oligonucleotide
uugccgccucccgggacguguuu

SEQ ID NO: 2733 - DNA, 23 bp, Artificial Sequence
  Description of Artificial Sequence: Synthetic oligonucleotide
  Description of Combined DNA/RNA Molecule: Synthetic oligonucleotide
ucugccgccucccgggacguguu

SEQ ID NO: 2734 - DNA, 23 bp, Artificial Sequence
  Description of Artificial Sequence: Synthetic oligonucleotide
  Description of Combined DNA/RNA Molecule: Synthetic oligonucleotide
uacugccgccucccgggacgugu

SEQ ID NO: 2735 - DNA, 23 bp, Artificial Sequence
  Description of Artificial Sequence: Synthetic oligonucleotide
  Description of Combined DNA/RNA Molecule: Synthetic oligonucleotide
ucactgccgccucccgggacgug

SEQ ID NO: 2736 - DNA, 23 bp, Artificial Sequence
  Description of Artificial Sequence: Synthetic oligonucleotide
  Description of Combined DNA/RNA Molecule: Synthetic oligonucleotide
uacacugccgccucccgggacgu

SEQ ID NO: 2737 - DNA, 23 bp, Artificial Sequence
  Description of Artificial Sequence: Synthetic oligonucleotide
  Description of Combined DNA/RNA Molecule: Synthetic oligonucleotide
ucacactgccgccucccgggacg

SEQ ID NO: 2738 - DNA, 23 bp, Artificial Sequence
  Description of Artificial Sequence: Synthetic oligonucleotide
  Description of Combined DNA/RNA Molecule: Synthetic oligonucleotide
ugcacacugccgccucccgggac

SEQ ID NO: 2739 - DNA, 23 bp, Artificial Sequence
  Description of Artificial Sequence: Synthetic oligonucleotide
  Description of Combined DNA/RNA Molecule: Synthetic oligonucleotide
uugcacacugccgccucccggga

SEQ ID NO: 2740 - DNA, 23 bp, Artificial Sequence
  Description of Artificial Sequence: Synthetic oligonucleotide
  Description of Combined DNA/RNA Molecule: Synthetic oligonucleotide
uuugcacacugccgccucccggg

SEQ ID NO: 2741 - DNA, 23 bp, Artificial Sequence
  Description of Artificial Sequence: Synthetic oligonucleotide
  Description of Combined DNA/RNA Molecule: Synthetic oligonucleotide
uuuugcacacugccgccucccgg

SEQ ID NO: 2742 - DNA, 23 bp, Artificial Sequence
  Description of Artificial Sequence: Synthetic oligonucleotide
  Description of Combined DNA/RNA Molecule: Synthetic oligonucleotide
uauutgcacacugccgccucccg

SEQ ID NO: 2743 - DNA, 23 bp, Artificial Sequence
  Description of Artificial Sequence: Synthetic oligonucleotide
  Description of Combined DNA/RNA Molecule: Synthetic oligonucleotide
uuguagacuauuugcacacugcc

SEQ ID NO: 2744 - DNA, 23 bp, Artificial Sequence
  Description of Artificial Sequence: Synthetic oligonucleotide
  Description of Combined DNA/RNA Molecule: Synthetic oligonucleotide
uuugtagacuauuugcacacugc

SEQ ID NO: 2745 - DNA, 23 bp, Artificial Sequence
  Description of Artificial Sequence: Synthetic oligonucleotide
  Description of Combined DNA/RNA Molecule: Synthetic oligonucleotide
uuuuguagacuauuugcacacug

SEQ ID NO: 2746 - DNA, 23 bp, Artificial Sequence
  Description of Artificial Sequence: Synthetic oligonucleotide
  Description of Combined DNA/RNA Molecule: Synthetic oligonucleotide
uguutgtagacuauuugcacacu

SEQ ID NO: 2747 - DNA, 23 bp, Artificial Sequence
  Description of Artificial Sequence: Synthetic oligonucleotide
  Description of Combined DNA/RNA Molecule: Synthetic oligonucleotide
uggutuguagacuauuugcacac

SEQ ID NO: 2748 - DNA, 23 bp, Artificial Sequence
  Description of Artificial Sequence: Synthetic oligonucleotide
  Description of Combined DNA/RNA Molecule: Synthetic oligonucleotide
uuggtutguagacuauuugcaca

SEQ ID NO: 2749 - DNA, 23 bp, Artificial Sequence
  Description of Artificial Sequence: Synthetic oligonucleotide
  Description of Combined DNA/RNA Molecule: Synthetic oligonucleotide
ucuggutuguagacuauuugcac

SEQ ID NO: 2750 - DNA, 23 bp, Artificial Sequence
  Description of Artificial Sequence: Synthetic oligonucleotide
  Description of Combined DNA/RNA Molecule: Synthetic oligonucleotide
uacuggtuuguagacuauuugca

SEQ ID NO: 2751 - DNA, 23 bp, Artificial Sequence
  Description of Artificial Sequence: Synthetic oligonucleotide
  Description of Combined DNA/RNA Molecule: Synthetic oligonucleotide
uaactgguuuguagacuauuugc

SEQ ID NO: 2752 - DNA, 23 bp, Artificial Sequence
  Description of Artificial Sequence: Synthetic oligonucleotide
  Description of Combined DNA/RNA Molecule: Synthetic oligonucleotide
ucaacugguuuguagacuauuug

SEQ ID NO: 2753 - DNA, 23 bp, Artificial Sequence
  Description of Artificial Sequence: Synthetic oligonucleotide
  Description of Combined DNA/RNA Molecule: Synthetic oligonucleotide
uucaactgguuuguagacuauuu

SEQ ID NO: 2754 - DNA, 23 bp, Artificial Sequence
  Description of Artificial Sequence: Synthetic oligonucleotide
  Description of Combined DNA/RNA Molecule: Synthetic oligonucleotide
ugucaacuggutuguagacuauu

SEQ ID NO: 2755 - DNA, 23 bp, Artificial Sequence
  Description of Artificial Sequence: Synthetic oligonucleotide
  Description of Combined DNA/RNA Molecule: Synthetic oligonucleotide
uggucaacugguuuguagacuau

SEQ ID NO: 2756 - DNA, 23 bp, Artificial Sequence
  Description of Artificial Sequence: Synthetic oligonucleotide
  Description of Combined DNA/RNA Molecule: Synthetic oligonucleotide
uaggtcaacugguuuguagacua

SEQ ID NO: 2757 - DNA, 23 bp, Artificial Sequence
  Description of Artificial Sequence: Synthetic oligonucleotide
  Description of Combined DNA/RNA Molecule: Synthetic oligonucleotide
ucaggucaacugguuuguagacu

SEQ ID NO: 2758 - DNA, 23 bp, Artificial Sequence
  Description of Artificial Sequence: Synthetic oligonucleotide
  Description of Combined DNA/RNA Molecule: Synthetic oligonucleotide
uucaggtcaacugguuuguagac

SEQ ID NO: 2759 - DNA, 23 bp, Artificial Sequence
  Description of Artificial Sequence: Synthetic oligonucleotide
  Description of Combined DNA/RNA Molecule: Synthetic oligonucleotide
ucucaggucaacugguuuguaga

SEQ ID NO: 2760 - DNA, 23 bp, Artificial Sequence
  Description of Artificial Sequence: Synthetic oligonucleotide
  Description of Combined DNA/RNA Molecule: Synthetic oligonucleotide
ugcucaggucaacugguuuguag

SEQ ID NO: 2761 - DNA, 23 bp, Artificial Sequence
  Description of Artificial Sequence: Synthetic oligonucleotide
  Description of Combined DNA/RNA Molecule: Synthetic oligonucleotide
uugctcaggucaacugguuugua

SEQ ID NO: 2762 - DNA, 23 bp, Artificial Sequence
  Description of Artificial Sequence: Synthetic oligonucleotide
  Description of Combined DNA/RNA Molecule: Synthetic oligonucleotide
uuugcucaggucaacugguuugu

SEQ ID NO: 2763 - DNA, 23 bp, Artificial Sequence
  Description of Artificial Sequence: Synthetic oligonucleotide
  Description of Combined DNA/RNA Molecule: Synthetic oligonucleotide
ucuugctcaggucaacugguuug

SEQ ID NO: 2764 - DNA, 23 bp, Artificial Sequence
  Description of Artificial Sequence: Synthetic oligonucleotide
  Description of Combined DNA/RNA Molecule: Synthetic oligonucleotide
ucuggutuaugauggauguugcc

SEQ ID NO: 2765 - DNA, 23 bp, Artificial Sequence
  Description of Artificial Sequence: Synthetic oligonucleotide
  Description of Combined DNA/RNA Molecule: Synthetic oligonucleotide
uccuggtuuaugauggauguugc

SEQ ID NO: 2766 - DNA, 23 bp, Artificial Sequence
  Description of Artificial Sequence: Synthetic oligonucleotide
  Description of Combined DNA/RNA Molecule: Synthetic oligonucleotide
uucctgguuuaugauggauguug

SEQ ID NO: 2767 - DNA, 23 bp, Artificial Sequence
  Description of Artificial Sequence: Synthetic oligonucleotide
  Description of Combined DNA/RNA Molecule: Synthetic oligonucleotide
ucuccugguuuaugauggauguu

SEQ ID NO: 2768 - DNA, 23 bp, Artificial Sequence
  Description of Artificial Sequence: Synthetic oligonucleotide
  Description of Combined DNA/RNA Molecule: Synthetic oligonucleotide
uccucctgguutaugauggaugu

SEQ ID NO: 2769 - DNA, 23 bp, Artificial Sequence
  Description of Artificial Sequence: Synthetic oligonucleotide
  Description of Combined DNA/RNA Molecule: Synthetic oligonucleotide
uacctccugguuuaugauggaug

SEQ ID NO: 2770 - DNA, 23 bp, Artificial Sequence
  Description of Artificial Sequence: Synthetic oligonucleotide
  Description of Combined DNA/RNA Molecule: Synthetic oligonucleotide
ucaccuccuggtuuaugauggau

SEQ ID NO: 2771 - DNA, 23 bp, Artificial Sequence
  Description of Artificial Sequence: Synthetic oligonucleotide
  Description of Combined DNA/RNA Molecule: Synthetic oligonucleotide
uccacctccugguuuaugaugga

SEQ ID NO: 2772 - DNA, 23 bp, Artificial Sequence
  Description of Artificial Sequence: Synthetic oligonucleotide
  Description of Combined DNA/RNA Molecule: Synthetic oligonucleotide
ugccaccuccugguuuaugaugg

SEQ ID NO: 2773 - DNA, 23 bp, Artificial Sequence
  Description of Artificial Sequence: Synthetic oligonucleotide
  Description of Combined DNA/RNA Molecule: Synthetic oligonucleotide
uggccaccuccugguuuaugaug

SEQ ID NO: 2774 - DNA, 23 bp, Artificial Sequence
  Description of Artificial Sequence: Synthetic oligonucleotide
  Description of Combined DNA/RNA Molecule: Synthetic oligonucleotide
uuggccaccuccugguuuaugau

SEQ ID NO: 2775 - DNA, 23 bp, Artificial Sequence
  Description of Artificial Sequence: Synthetic oligonucleotide
  Description of Combined DNA/RNA Molecule: Synthetic oligonucleotide
ucuggccaccuccugguuuauga

SEQ ID NO: 2776 - DNA, 23 bp, Artificial Sequence
  Description of Artificial Sequence: Synthetic oligonucleotide
  Description of Combined DNA/RNA Molecule: Synthetic oligonucleotide
uccuggccaccuccugguuuaug

SEQ ID NO: 2777 - DNA, 23 bp, Artificial Sequence
  Description of Artificial Sequence: Synthetic oligonucleotide
  Description of Combined DNA/RNA Molecule: Synthetic oligonucleotide
uacctggccaccuccugguuuau

SEQ ID NO: 2778 - DNA, 23 bp, Artificial Sequence
  Description of Artificial Sequence: Synthetic oligonucleotide
  Description of Combined DNA/RNA Molecule: Synthetic oligonucleotide
ucaccuggccaccuccugguuua

SEQ ID NO: 2779 - DNA, 23 bp, Artificial Sequence
  Description of Artificial Sequence: Synthetic oligonucleotide
  Description of Combined DNA/RNA Molecule: Synthetic oligonucleotide
uccacctggccaccuccugguuu

SEQ ID NO: 2780 - DNA, 23 bp, Artificial Sequence
  Description of Artificial Sequence: Synthetic oligonucleotide
  Description of Combined DNA/RNA Molecule: Synthetic oligonucleotide
uuccaccuggccaccuccugguu

SEQ ID NO: 2781 - DNA, 23 bp, Artificial Sequence
  Description of Artificial Sequence: Synthetic oligonucleotide
  Description of Combined DNA/RNA Molecule: Synthetic oligonucleotide
uuuccaccuggccaccuccuggu

SEQ ID NO: 2782 - DNA, 23 bp, Artificial Sequence
  Description of Artificial Sequence: Synthetic oligonucleotide
  Description of Combined DNA/RNA Molecule: Synthetic oligonucleotide
ucuuccaccuggccaccuccugg

SEQ ID NO: 2783 - DNA, 23 bp, Artificial Sequence
  Description of Artificial Sequence: Synthetic oligonucleotide
  Description of Combined DNA/RNA Molecule: Synthetic oligonucleotide
uacutccaccuggccaccuccug

SEQ ID NO: 2784 - DNA, 23 bp, Artificial Sequence
  Description of Artificial Sequence: Synthetic oligonucleotide
  Description of Combined DNA/RNA Molecule: Synthetic oligonucleotide
uuactuccaccuggccaccuccu

SEQ ID NO: 2785 - RNA, 23 nt, Artificial Sequence
  Description of Artificial Sequence: Synthetic oligonucleotide
ucacgugacccaagcucgcaugg

SEQ ID NO: 2786 - RNA, 23 nt, Artificial Sequence
  Description of Artificial Sequence: Synthetic oligonucleotide
cacgugacccaagcucgcauggu

SEQ ID NO: 2787 - RNA, 23 nt, Artificial Sequence
  Description of Artificial Sequence: Synthetic oligonucleotide
acgugacccaagcucgcaugguc

SEQ ID NO: 2788 - RNA, 23 nt, Artificial Sequence
  Description of Artificial Sequence: Synthetic oligonucleotide
cgugacccaagcucgcaugguca

SEQ ID NO: 2789 - RNA, 23 nt, Artificial Sequence
  Description of Artificial Sequence: Synthetic oligonucleotide
gugacccaagcucgcauggucag

SEQ ID NO: 2790 - RNA, 23 nt, Artificial Sequence
  Description of Artificial Sequence: Synthetic oligonucleotide
ugacccaagcucgcauggucagu

SEQ ID NO: 2791 - RNA, 23 nt, Artificial Sequence
  Description of Artificial Sequence: Synthetic oligonucleotide
gacccaagcucgcauggucagua

SEQ ID NO: 2792 - RNA, 23 nt, Artificial Sequence
  Description of Artificial Sequence: Synthetic oligonucleotide
acccaagcucgcauggucaguaa

SEQ ID NO: 2793 - RNA, 23 nt, Artificial Sequence
  Description of Artificial Sequence: Synthetic oligonucleotide
cccaagcucgcauggucaguaaa

SEQ ID NO: 2794 - RNA, 23 nt, Artificial Sequence
  Description of Artificial Sequence: Synthetic oligonucleotide
ccaagcucgcauggucaguaaaa

SEQ ID NO: 2795 - RNA, 23 nt, Artificial Sequence
  Description of Artificial Sequence: Synthetic oligonucleotide
caagcucgcauggucaguaaaag

SEQ ID NO: 2796 - RNA, 23 nt, Artificial Sequence
  Description of Artificial Sequence: Synthetic oligonucleotide
aagcucgcauggucaguaaaagc

SEQ ID NO: 2797 - RNA, 23 nt, Artificial Sequence
  Description of Artificial Sequence: Synthetic oligonucleotide
agcucgcauggucaguaaaagca

SEQ ID NO: 2798 - RNA, 23 nt, Artificial Sequence
  Description of Artificial Sequence: Synthetic oligonucleotide
gcucgcauggucaguaaaagcaa

SEQ ID NO: 2799 - RNA, 23 nt, Artificial Sequence
  Description of Artificial Sequence: Synthetic oligonucleotide
cucgcauggucaguaaaagcaaa

SEQ ID NO: 2800 - RNA, 23 nt, Artificial Sequence
  Description of Artificial Sequence: Synthetic oligonucleotide
ucgcauggucaguaaaagcaaag

SEQ ID NO: 2801 - RNA, 23 nt, Artificial Sequence
  Description of Artificial Sequence: Synthetic oligonucleotide
cgcauggucaguaaaagcaaaga

SEQ ID NO: 2802 - RNA, 23 nt, Artificial Sequence
  Description of Artificial Sequence: Synthetic oligonucleotide
gcauggucaguaaaagcaaagac

SEQ ID NO: 2803 - RNA, 23 nt, Artificial Sequence
  Description of Artificial Sequence: Synthetic oligonucleotide
cauggucaguaaaagcaaagacg

SEQ ID NO: 2804 - RNA, 23 nt, Artificial Sequence
  Description of Artificial Sequence: Synthetic oligonucleotide
auggucaguaaaagcaaagacgg

SEQ ID NO: 2805 - RNA, 23 nt, Artificial Sequence
  Description of Artificial Sequence: Synthetic oligonucleotide
uggucaguaaaagcaaagacggg

SEQ ID NO: 2806 - RNA, 23 nt, Artificial Sequence
  Description of Artificial Sequence: Synthetic oligonucleotide
ggucaguaaaagcaaagacggga

SEQ ID NO: 2807 - RNA, 23 nt, Artificial Sequence
  Description of Artificial Sequence: Synthetic oligonucleotide
gucaguaaaagcaaagacgggac

SEQ ID NO: 2808 - RNA, 23 nt, Artificial Sequence
  Description of Artificial Sequence: Synthetic oligonucleotide
ucaguaaaagcaaagacgggacu

SEQ ID NO: 2809 - RNA, 23 nt, Artificial Sequence
  Description of Artificial Sequence: Synthetic oligonucleotide
caguaaaagcaaagacgggacug

SEQ ID NO: 2810 - RNA, 23 nt, Artificial Sequence
  Description of Artificial Sequence: Synthetic oligonucleotide
ggauaauaucaaacacgucccgg

SEQ ID NO: 2811 - RNA, 23 nt, Artificial Sequence
  Description of Artificial Sequence: Synthetic oligonucleotide
gauaauaucaaacacgucccggg

SEQ ID NO: 2812 - RNA, 23 nt, Artificial Sequence
  Description of Artificial Sequence: Synthetic oligonucleotide
auaauaucaaacacgucccggga

SEQ ID NO: 2813 - RNA, 23 nt, Artificial Sequence
  Description of Artificial Sequence: Synthetic oligonucleotide
uaauaucaaacacgucccgggag

SEQ ID NO: 2814 - RNA, 23 nt, Artificial Sequence
  Description of Artificial Sequence: Synthetic oligonucleotide
aauaucaaacacgucccgggagg

SEQ ID NO: 2815 - RNA, 23 nt, Artificial Sequence
  Description of Artificial Sequence: Synthetic oligonucleotide
auaucaaacacgucccgggaggc

SEQ ID NO: 2816 - RNA, 23 nt, Artificial Sequence
  Description of Artificial Sequence: Synthetic oligonucleotide
uaucaaacacgucccgggaggcg

SEQ ID NO: 2817 - RNA, 23 nt, Artificial Sequence
  Description of Artificial Sequence: Synthetic oligonucleotide
aucaaacacgucccgggaggcgg

SEQ ID NO: 2818 - RNA, 23 nt, Artificial Sequence
  Description of Artificial Sequence: Synthetic oligonucleotide
ucaaacacgucccgggaggcggc

SEQ ID NO: 2819 - RNA, 23 nt, Artificial Sequence
  Description of Artificial Sequence: Synthetic oligonucleotide
caaacacgucccgggaggcggca

SEQ ID NO: 2820 - RNA, 23 nt, Artificial Sequence
  Description of Artificial Sequence: Synthetic oligonucleotide
aaacacgucccgggaggcggcag

SEQ ID NO: 2821 - RNA, 23 nt, Artificial Sequence
  Description of Artificial Sequence: Synthetic oligonucleotide
aacacgucccgggaggcggcagu

SEQ ID NO: 2822 - RNA, 23 nt, Artificial Sequence
  Description of Artificial Sequence: Synthetic oligonucleotide
acacgucccgggaggcggcagug

SEQ ID NO: 2823 - RNA, 23 nt, Artificial Sequence
  Description of Artificial Sequence: Synthetic oligonucleotide
cacgucccgggaggcggcagugu

SEQ ID NO: 2824 - RNA, 23 nt, Artificial Sequence
  Description of Artificial Sequence: Synthetic oligonucleotide
acgucccgggaggcggcagugug

SEQ ID NO: 2825 - RNA, 23 nt, Artificial Sequence
  Description of Artificial Sequence: Synthetic oligonucleotide
cgucccgggaggcggcagugugc

SEQ ID NO: 2826 - RNA, 23 nt, Artificial Sequence
  Description of Artificial Sequence: Synthetic oligonucleotide
gucccgggaggcggcagugugca

SEQ ID NO: 2827 - RNA, 23 nt, Artificial Sequence
  Description of Artificial Sequence: Synthetic oligonucleotide
ucccgggaggcggcagugugcaa

SEQ ID NO: 2828 - RNA, 23 nt, Artificial Sequence
  Description of Artificial Sequence: Synthetic oligonucleotide
cccgggaggcggcagugugcaaa

SEQ ID NO: 2829 - RNA, 23 nt, Artificial Sequence
  Description of Artificial Sequence: Synthetic oligonucleotide
ccgggaggcggcagugugcaaau

SEQ ID NO: 2830 - RNA, 23 nt, Artificial Sequence
  Description of Artificial Sequence: Synthetic oligonucleotide
cgggaggcggcagugugcaaaua

SEQ ID NO: 2831 - RNA, 23 nt, Artificial Sequence
  Description of Artificial Sequence: Synthetic oligonucleotide
ggcagugugcaaauagucuacaa

SEQ ID NO: 2832 - RNA, 23 nt, Artificial Sequence
  Description of Artificial Sequence: Synthetic oligonucleotide
gcagugugcaaauagucuacaaa

SEQ ID NO: 2833 - RNA, 23 nt, Artificial Sequence
  Description of Artificial Sequence: Synthetic oligonucleotide
cagugugcaaauagucuacaaac

SEQ ID NO: 2834 - RNA, 23 nt, Artificial Sequence
  Description of Artificial Sequence: Synthetic oligonucleotide
agugugcaaauagucuacaaacc

SEQ ID NO: 2835 - RNA, 23 nt, Artificial Sequence
  Description of Artificial Sequence: Synthetic oligonucleotide
gugugcaaauagucuacaaacca

SEQ ID NO: 2836 - RNA, 23 nt, Artificial Sequence
  Description of Artificial Sequence: Synthetic oligonucleotide
ugugcaaauagucuacaaaccag

SEQ ID NO: 2837 - RNA, 23 nt, Artificial Sequence
  Description of Artificial Sequence: Synthetic oligonucleotide
gugcaaauagucuacaaaccagu

SEQ ID NO: 2838 - RNA, 23 nt, Artificial Sequence
  Description of Artificial Sequence: Synthetic oligonucleotide
ugcaaauagucuacaaaccaguu

SEQ ID NO: 2839 - RNA, 23 nt, Artificial Sequence
  Description of Artificial Sequence: Synthetic oligonucleotide
gcaaauagucuacaaaccaguug

SEQ ID NO: 2840 - RNA, 23 nt, Artificial Sequence
  Description of Artificial Sequence: Synthetic oligonucleotide
caaauagucuacaaaccaguuga

SEQ ID NO: 2841 - RNA, 23 nt, Artificial Sequence
  Description of Artificial Sequence: Synthetic oligonucleotide
aaauagucuacaaaccaguugac

SEQ ID NO: 2842 - RNA, 23 nt, Artificial Sequence
  Description of Artificial Sequence: Synthetic oligonucleotide
aauagucuacaaaccaguugacc

SEQ ID NO: 2843 - RNA, 23 nt, Artificial Sequence
  Description of Artificial Sequence: Synthetic oligonucleotide
auagucuacaaaccaguugaccu

SEQ ID NO: 2844 - RNA, 23 nt, Artificial Sequence
  Description of Artificial Sequence: Synthetic oligonucleotide
uagucuacaaaccaguugaccug

SEQ ID NO: 2845 - RNA, 23 nt, Artificial Sequence
  Description of Artificial Sequence: Synthetic oligonucleotide
agucuacaaaccaguugaccuga

SEQ ID NO: 2846 - RNA, 23 nt, Artificial Sequence
  Description of Artificial Sequence: Synthetic oligonucleotide
gucuacaaaccaguugaccugag

SEQ ID NO: 2847 - RNA, 23 nt, Artificial Sequence
  Description of Artificial Sequence: Synthetic oligonucleotide
ucuacaaaccaguugaccugagc

SEQ ID NO: 2848 - RNA, 23 nt, Artificial Sequence
  Description of Artificial Sequence: Synthetic oligonucleotide
cuacaaaccaguugaccugagca

SEQ ID NO: 2849 - RNA, 23 nt, Artificial Sequence
  Description of Artificial Sequence: Synthetic oligonucleotide
uacaaaccaguugaccugagcaa

SEQ ID NO: 2850 - RNA, 23 nt, Artificial Sequence
  Description of Artificial Sequence: Synthetic oligonucleotide
acaaaccaguugaccugagcaag

SEQ ID NO: 2851 - RNA, 23 nt, Artificial Sequence
  Description of Artificial Sequence: Synthetic oligonucleotide
caaaccaguugaccugagcaagg

SEQ ID NO: 2852 - RNA, 23 nt, Artificial Sequence
  Description of Artificial Sequence: Synthetic oligonucleotide
ggcaacauccaucauaaaccagg

SEQ ID NO: 2853 - RNA, 23 nt, Artificial Sequence
  Description of Artificial Sequence: Synthetic oligonucleotide
gcaacauccaucauaaaccagga

SEQ ID NO: 2854 - RNA, 23 nt, Artificial Sequence
  Description of Artificial Sequence: Synthetic oligonucleotide
caacauccaucauaaaccaggag

SEQ ID NO: 2855 - RNA, 23 nt, Artificial Sequence
  Description of Artificial Sequence: Synthetic oligonucleotide
aacauccaucauaaaccaggagg

SEQ ID NO: 2856 - RNA, 23 nt, Artificial Sequence
  Description of Artificial Sequence: Synthetic oligonucleotide
acauccaucauaaaccaggaggu

SEQ ID NO: 2857 - RNA, 23 nt, Artificial Sequence
  Description of Artificial Sequence: Synthetic oligonucleotide
cauccaucauaaaccaggaggug

SEQ ID NO: 2858 - RNA, 23 nt, Artificial Sequence
  Description of Artificial Sequence: Synthetic oligonucleotide
auccaucauaaaccaggaggugg

SEQ ID NO: 2859 - RNA, 23 nt, Artificial Sequence
  Description of Artificial Sequence: Synthetic oligonucleotide
uccaucauaaaccaggagguggc

SEQ ID NO: 2860 - RNA, 23 nt, Artificial Sequence
  Description of Artificial Sequence: Synthetic oligonucleotide
ccaucauaaaccaggagguggcc

SEQ ID NO: 2861 - RNA, 23 nt, Artificial Sequence
  Description of Artificial Sequence: Synthetic oligonucleotide
caucauaaaccaggagguggcca

SEQ ID NO: 2862 - RNA, 23 nt, Artificial Sequence
  Description of Artificial Sequence: Synthetic oligonucleotide
aucauaaaccaggagguggccag

SEQ ID NO: 2863 - RNA, 23 nt, Artificial Sequence
  Description of Artificial Sequence: Synthetic oligonucleotide
ucauaaaccaggagguggccagg

SEQ ID NO: 2864 - RNA, 23 nt, Artificial Sequence
  Description of Artificial Sequence: Synthetic oligonucleotide
cauaaaccaggagguggccaggu

SEQ ID NO: 2865 - RNA, 23 nt, Artificial Sequence
  Description of Artificial Sequence: Synthetic oligonucleotide
auaaaccaggagguggccaggug

SEQ ID NO: 2866 - RNA, 23 nt, Artificial Sequence
  Description of Artificial Sequence: Synthetic oligonucleotide
uaaaccaggagguggccaggugg

SEQ ID NO: 2867 - RNA, 23 nt, Artificial Sequence
  Description of Artificial Sequence: Synthetic oligonucleotide
aaaccaggagguggccaggugga

SEQ ID NO: 2868 - RNA, 23 nt, Artificial Sequence
  Description of Artificial Sequence: Synthetic oligonucleotide
aaccaggagguggccagguggaa

SEQ ID NO: 2869 - RNA, 23 nt, Artificial Sequence
  Description of Artificial Sequence: Synthetic oligonucleotide
accaggagguggccagguggaag

SEQ ID NO: 2870 - RNA, 23 nt, Artificial Sequence
  Description of Artificial Sequence: Synthetic oligonucleotide
ccaggagguggccagguggaagu

SEQ ID NO: 2871 - RNA, 23 nt, Artificial Sequence
  Description of Artificial Sequence: Synthetic oligonucleotide
caggagguggccagguggaagua

SEQ ID NO: 2872 - RNA, 23 nt, Artificial Sequence
  Description of Artificial Sequence: Synthetic oligonucleotide
aggagguggccagguggaaguaa

SEQ ID NO: 2873 - RNA, 21 nt, Artificial Sequence
  Description of Artificial Sequence: Synthetic oligonucleotide
gcagauaauuaauaagaagca

SEQ ID NO: 2874 - RNA, 21 nt, Artificial Sequence
  Description of Artificial Sequence: Synthetic oligonucleotide
cagauaauuaauaagaagcua

SEQ ID NO: 2875 - RNA, 21 nt, Artificial Sequence
  Description of Artificial Sequence: Synthetic oligonucleotide
agauaauuaauaagaagcuga

SEQ ID NO: 2876 - RNA, 21 nt, Artificial Sequence
  Description of Artificial Sequence: Synthetic oligonucleotide
gauaauuaauaagaagcugga

SEQ ID NO: 2877 - RNA, 21 nt, Artificial Sequence
  Description of Artificial Sequence: Synthetic oligonucleotide
auaauuaauaagaagcuggaa

SEQ ID NO: 2878 - RNA, 21 nt, Artificial Sequence
  Description of Artificial Sequence: Synthetic oligonucleotide
uaauuaauaagaagcuggaua

SEQ ID NO: 2879 - RNA, 21 nt, Artificial Sequence
  Description of Artificial Sequence: Synthetic oligonucleotide
aauuaauaagaagcuggauca

SEQ ID NO: 2880 - RNA, 21 nt, Artificial Sequence
  Description of Artificial Sequence: Synthetic oligonucleotide
auuaauaagaagcuggaucua

SEQ ID NO: 2881 - RNA, 21 nt, Artificial Sequence
  Description of Artificial Sequence: Synthetic oligonucleotide
uuaauaagaagcuggaucuua

SEQ ID NO: 2882 - RNA, 21 nt, Artificial Sequence
  Description of Artificial Sequence: Synthetic oligonucleotide
uaauaagaagcuggaucuuaa

SEQ ID NO: 2883 - RNA, 21 nt, Artificial Sequence
  Description of Artificial Sequence: Synthetic oligonucleotide
aauaagaagcuggaucuuaga

SEQ ID NO: 2884 - RNA, 21 nt, Artificial Sequence
  Description of Artificial Sequence: Synthetic oligonucleotide
auaagaagcuggaucuuagca

SEQ ID NO: 2885 - RNA, 21 nt, Artificial Sequence
  Description of Artificial Sequence: Synthetic oligonucleotide
uaagaagcuggaucuuagcaa

SEQ ID NO: 2886 - RNA, 21 nt, Artificial Sequence
  Description of Artificial Sequence: Synthetic oligonucleotide
aagaagcuggaucuuagcaaa

SEQ ID NO: 2887 - RNA, 21 nt, Artificial Sequence
  Description of Artificial Sequence: Synthetic oligonucleotide
agaagcuggaucuuagcaaca

SEQ ID NO: 2888 - RNA, 21 nt, Artificial Sequence
  Description of Artificial Sequence: Synthetic oligonucleotide
gaagcuggaucuuagcaacga

SEQ ID NO: 2889 - RNA, 21 nt, Artificial Sequence
  Description of Artificial Sequence: Synthetic oligonucleotide
aagcuggaucuuagcaacgua

SEQ ID NO: 2890 - RNA, 21 nt, Artificial Sequence
  Description of Artificial Sequence: Synthetic oligonucleotide
agcuggaucuuagcaacguca

SEQ ID NO: 2891 - RNA, 21 nt, Artificial Sequence
  Description of Artificial Sequence: Synthetic oligonucleotide
gcuggaucuuagcaacgucca

SEQ ID NO: 2892 - RNA, 21 nt, Artificial Sequence
  Description of Artificial Sequence: Synthetic oligonucleotide
cuggaucuuagcaacguccaa

SEQ ID NO: 2893 - RNA, 21 nt, Artificial Sequence
  Description of Artificial Sequence: Synthetic oligonucleotide
uggaucuuagcaacguccaga

SEQ ID NO: 2894 - RNA, 21 nt, Artificial Sequence
  Description of Artificial Sequence: Synthetic oligonucleotide
ggaucuuagcaacguccagua

SEQ ID NO: 2895 - RNA, 21 nt, Artificial Sequence
  Description of Artificial Sequence: Synthetic oligonucleotide
gaucuuagcaacguccaguca

SEQ ID NO: 2896 - RNA, 21 nt, Artificial Sequence
  Description of Artificial Sequence: Synthetic oligonucleotide
aucuuagcaacguccagucca

SEQ ID NO: 2897 - RNA, 21 nt, Artificial Sequence
  Description of Artificial Sequence: Synthetic oligonucleotide
ucuuagcaacguccaguccaa

SEQ ID NO: 2898 - RNA, 21 nt, Artificial Sequence
  Description of Artificial Sequence: Synthetic oligonucleotide
cuuagcaacguccaguccaaa

SEQ ID NO: 2899 - RNA, 21 nt, Artificial Sequence
  Description of Artificial Sequence: Synthetic oligonucleotide
uuagcaacguccaguccaaga

SEQ ID NO: 2900 - RNA, 21 nt, Artificial Sequence
  Description of Artificial Sequence: Synthetic oligonucleotide
uagcaacguccaguccaagua

SEQ ID NO: 2901 - RNA, 21 nt, Artificial Sequence
  Description of Artificial Sequence: Synthetic oligonucleotide
agcaacguccaguccaaguga

SEQ ID NO: 2902 - RNA, 21 nt, Artificial Sequence
  Description of Artificial Sequence: Synthetic oligonucleotide
gcaacguccaguccaagugua

SEQ ID NO: 2903 - RNA, 21 nt, Artificial Sequence
  Description of Artificial Sequence: Synthetic oligonucleotide
caacguccaguccaaguguga

SEQ ID NO: 2904 - RNA, 21 nt, Artificial Sequence
  Description of Artificial Sequence: Synthetic oligonucleotide
aacguccaguccaagugugga

SEQ ID NO: 2905 - RNA, 21 nt, Artificial Sequence
  Description of Artificial Sequence: Synthetic oligonucleotide
acguccaguccaaguguggca

SEQ ID NO: 2906 - RNA, 21 nt, Artificial Sequence
  Description of Artificial Sequence: Synthetic oligonucleotide
cguccaguccaaguguggcua

SEQ ID NO: 2907 - RNA, 21 nt, Artificial Sequence
  Description of Artificial Sequence: Synthetic oligonucleotide
guccaguccaaguguggcuca

SEQ ID NO: 2908 - RNA, 21 nt, Artificial Sequence
  Description of Artificial Sequence: Synthetic oligonucleotide
uccaguccaaguguggcucaa

SEQ ID NO: 2909 - RNA, 21 nt, Artificial Sequence
  Description of Artificial Sequence: Synthetic oligonucleotide
ccaguccaaguguggcucaaa

SEQ ID NO: 2910 - RNA, 21 nt, Artificial Sequence
  Description of Artificial Sequence: Synthetic oligonucleotide
caguccaaguguggcucaaaa

SEQ ID NO: 2911 - RNA, 21 nt, Artificial Sequence
  Description of Artificial Sequence: Synthetic oligonucleotide
aguccaaguguggcucaaaga

SEQ ID NO: 2912 - RNA, 21 nt, Artificial Sequence
  Description of Artificial Sequence: Synthetic oligonucleotide
guccaaguguggcucaaagga

SEQ ID NO: 2913 - RNA, 21 nt, Artificial Sequence
  Description of Artificial Sequence: Synthetic oligonucleotide
uccaaguguggcucaaaggaa

SEQ ID NO: 2914 - RNA, 21 nt, Artificial Sequence
  Description of Artificial Sequence: Synthetic oligonucleotide
ccaaguguggcucaaaggaua

SEQ ID NO: 2915 - RNA, 21 nt, Artificial Sequence
  Description of Artificial Sequence: Synthetic oligonucleotide
caaguguggcucaaaggauaa

SEQ ID NO: 2916 - RNA, 21 nt, Artificial Sequence
  Description of Artificial Sequence: Synthetic oligonucleotide
aaguguggcucaaaggauaaa

SEQ ID NO: 2917 - RNA, 21 nt, Artificial Sequence
  Description of Artificial Sequence: Synthetic oligonucleotide
aguguggcucaaaggauaaua

SEQ ID NO: 2918 - RNA, 21 nt, Artificial Sequence
  Description of Artificial Sequence: Synthetic oligonucleotide
guguggcucaaaggauaauaa

SEQ ID NO: 2919 - RNA, 21 nt, Artificial Sequence
  Description of Artificial Sequence: Synthetic oligonucleotide
uguggcucaaaggauaauaua

SEQ ID NO: 2920 - RNA, 21 nt, Artificial Sequence
  Description of Artificial Sequence: Synthetic oligonucleotide
guggcucaaaggauaauauca

SEQ ID NO: 2921 - RNA, 21 nt, Artificial Sequence
  Description of Artificial Sequence: Synthetic oligonucleotide
uggcucaaaggauaauaucaa

SEQ ID NO: 2922 - RNA, 21 nt, Artificial Sequence
  Description of Artificial Sequence: Synthetic oligonucleotide
ggcucaaaggauaauaucaaa

SEQ ID NO: 2923 - RNA, 21 nt, Artificial Sequence
  Description of Artificial Sequence: Synthetic oligonucleotide
gcucaaaggauaauaucaaaa

SEQ ID NO: 2924 - RNA, 21 nt, Artificial Sequence
  Description of Artificial Sequence: Synthetic oligonucleotide
cucaaaggauaauaucaaaca

SEQ ID NO: 2925 - RNA, 21 nt, Artificial Sequence
  Description of Artificial Sequence: Synthetic oligonucleotide
ucaaaggauaauaucaaacaa

SEQ ID NO: 2926 - RNA, 21 nt, Artificial Sequence
  Description of Artificial Sequence: Synthetic oligonucleotide
caaaggauaauaucaaacaca

SEQ ID NO: 2927 - RNA, 21 nt, Artificial Sequence
  Description of Artificial Sequence: Synthetic oligonucleotide
aaaggauaauaucaaacacga

SEQ ID NO: 2928 - RNA, 21 nt, Artificial Sequence
  Description of Artificial Sequence: Synthetic oligonucleotide
aaggauaauaucaaacacgua

SEQ ID NO: 2929 - RNA, 21 nt, Artificial Sequence
  Description of Artificial Sequence: Synthetic oligonucleotide
aggauaauaucaaacacguca

SEQ ID NO: 2930 - RNA, 21 nt, Artificial Sequence
  Description of Artificial Sequence: Synthetic oligonucleotide
ggauaauaucaaacacgucca

SEQ ID NO: 2931 - RNA, 21 nt, Artificial Sequence
  Description of Artificial Sequence: Synthetic oligonucleotide
gauaauaucaaacacguccca

SEQ ID NO: 2932 - RNA, 21 nt, Artificial Sequence
  Description of Artificial Sequence: Synthetic oligonucleotide
auaauaucaaacacgucccga

SEQ ID NO: 2933 - RNA, 21 nt, Artificial Sequence
  Description of Artificial Sequence: Synthetic oligonucleotide
uaauaucaaacacgucccgga

SEQ ID NO: 2934 - RNA, 21 nt, Artificial Sequence
  Description of Artificial Sequence: Synthetic oligonucleotide
aauaucaaacacgucccggga

SEQ ID NO: 2935 - RNA, 21 nt, Artificial Sequence
  Description of Artificial Sequence: Synthetic oligonucleotide
auaucaaacacgucccgggaa

SEQ ID NO: 2936 - RNA, 21 nt, Artificial Sequence
  Description of Artificial Sequence: Synthetic oligonucleotide
uaucaaacacgucccgggaga

SEQ ID NO: 2937 - RNA, 21 nt, Artificial Sequence
  Description of Artificial Sequence: Synthetic oligonucleotide
aucaaacacgucccgggagga

SEQ ID NO: 2938 - RNA, 21 nt, Artificial Sequence
  Description of Artificial Sequence: Synthetic oligonucleotide
ucaaacacgucccgggaggca

SEQ ID NO: 2939 - RNA, 21 nt, Artificial Sequence
  Description of Artificial Sequence: Synthetic oligonucleotide
caaacacgucccgggaggcga

SEQ ID NO: 2940 - RNA, 21 nt, Artificial Sequence
  Description of Artificial Sequence: Synthetic oligonucleotide
aaacacgucccgggaggcgga

SEQ ID NO: 2941 - RNA, 21 nt, Artificial Sequence
  Description of Artificial Sequence: Synthetic oligonucleotide
aacacgucccgggaggcggca

SEQ ID NO: 2942 - RNA, 21 nt, Artificial Sequence
  Description of Artificial Sequence: Synthetic oligonucleotide
cacgucccgggaggcggcaga

SEQ ID NO: 2943 - DNA, 23 bp, Artificial Sequence
  Description of Artificial Sequence: Synthetic oligonucleotide
  Description of Combined DNA/RNA Molecule: Synthetic oligonucleotide
ugcutctuauuaauuaucugcac

SEQ ID NO: 2944 - DNA, 23 bp, Artificial Sequence
  Description of Artificial Sequence: Synthetic oligonucleotide
  Description of Combined DNA/RNA Molecule: Synthetic oligonucleotide
uagctucuuautaauuaucugca

SEQ ID NO: 2945 - DNA, 23 bp, Artificial Sequence
  Description of Artificial Sequence: Synthetic oligonucleotide
  Description of Combined DNA/RNA Molecule: Synthetic oligonucleotide
ucagcutcuuatuaauuaucugc

SEQ ID NO: 2946 - DNA, 23 bp, Artificial Sequence
  Description of Artificial Sequence: Synthetic oligonucleotide
  Description of Combined DNA/RNA Molecule: Synthetic oligonucleotide
uccagctucuuauuaauuaucug

SEQ ID NO: 2947 - DNA, 23 bp, Artificial Sequence
  Description of Artificial Sequence: Synthetic oligonucleotide
  Description of Combined DNA/RNA Molecule: Synthetic oligonucleotide
utccagcuucutauuaauuaucu

SEQ ID NO: 2948 - DNA, 23 bp, Artificial Sequence
  Description of Artificial Sequence: Synthetic oligonucleotide
  Description of Combined DNA/RNA Molecule: Synthetic oligonucleotide
uauccagcuuctuauuaauuauc

SEQ ID NO: 2949 - RNA, 23 nt, Artificial Sequence
  Description of Artificial Sequence: Synthetic oligonucleotide
ugauccagcuucuuauuaauuau

SEQ ID NO: 2950 - DNA, 23 bp, Artificial Sequence
  Description of Artificial Sequence: Synthetic oligonucleotide
  Description of Combined DNA/RNA Molecule: Synthetic oligonucleotide
uagatccagcutcuuauuaauua

SEQ ID NO: 2951 - DNA, 23 bp, Artificial Sequence
  Description of Artificial Sequence: Synthetic oligonucleotide
  Description of Combined DNA/RNA Molecule: Synthetic oligonucleotide
uaagauccagctucuuauuaauu

SEQ ID NO: 2952 - DNA, 23 bp, Artificial Sequence
  Description of Artificial Sequence: Synthetic oligonucleotide
  Description of Combined DNA/RNA Molecule: Synthetic oligonucleotide
utaagatccagcuucuuauuaau

SEQ ID NO: 2953 - RNA, 23 nt, Artificial Sequence
  Description of Artificial Sequence: Synthetic oligonucleotide
ucuaagauccagcuucuuauuaa

SEQ ID NO: 2954 - RNA, 23 nt, Artificial Sequence
  Description of Artificial Sequence: Synthetic oligonucleotide
ugcuaagauccagcuucuuauua

SEQ ID NO: 2955 - DNA, 23 bp, Artificial Sequence
  Description of Artificial Sequence: Synthetic oligonucleotide
  Description of Combined DNA/RNA Molecule: Synthetic oligonucleotide
utgctaagauccagcuucuuauu

SEQ ID NO: 2956 - DNA, 23 bp, Artificial Sequence
  Description of Artificial Sequence: Synthetic oligonucleotide
  Description of Combined DNA/RNA Molecule: Synthetic oligonucleotide
utugcuaagauccagcuucuuau

SEQ ID NO: 2957 - DNA, 23 bp, Artificial Sequence
  Description of Artificial Sequence: Synthetic oligonucleotide
  Description of Combined DNA/RNA Molecule: Synthetic oligonucleotide
uguugctaagatccagcuucuua

SEQ ID NO: 2958 - DNA, 23 bp, Artificial Sequence
  Description of Artificial Sequence: Synthetic oligonucleotide
  Description of Combined DNA/RNA Molecule: Synthetic oligonucleotide
ucgutgcuaagauccagcuucuu

SEQ ID NO: 2959 - DNA, 23 bp, Artificial Sequence
  Description of Artificial Sequence: Synthetic oligonucleotide
  Description of Combined DNA/RNA Molecule: Synthetic oligonucleotide
uacgtugcuaagauccagcuucu

SEQ ID NO: 2960 - DNA, 23 bp, Artificial Sequence
  Description of Artificial Sequence: Synthetic oligonucleotide
  Description of Combined DNA/RNA Molecule: Synthetic oligonucleotide
ugacgutgcuaagauccagcuuc

SEQ ID NO: 2961 - DNA, 23 bp, Artificial Sequence
  Description of Artificial Sequence: Synthetic oligonucleotide
  Description of Combined DNA/RNA Molecule: Synthetic oligonucleotide
uggacgtugcuaagauccagcuu

SEQ ID NO: 2962 - DNA, 23 bp, Artificial Sequence
  Description of Artificial Sequence: Synthetic oligonucleotide
  Description of Combined DNA/RNA Molecule: Synthetic oligonucleotide
utggacguugctaagauccagcu

SEQ ID NO: 2963 - RNA, 23 nt, Artificial Sequence
  Description of Artificial Sequence: Synthetic oligonucleotide
ucuggacguugcuaagauccagc

SEQ ID NO: 2964 - RNA, 23 nt, Artificial Sequence
  Description of Artificial Sequence: Synthetic oligonucleotide
uacuggacguugcuaagauccag

SEQ ID NO: 2965 - DNA, 23 bp, Artificial Sequence
  Description of Artificial Sequence: Synthetic oligonucleotide
  Description of Combined DNA/RNA Molecule: Synthetic oligonucleotide
ugactggacgutgcuaagaucca

SEQ ID NO: 2966 - DNA, 23 bp, Artificial Sequence
  Description of Artificial Sequence: Synthetic oligonucleotide
  Description of Combined DNA/RNA Molecule: Synthetic oligonucleotide
uggacuggacgtugcuaagaucc

SEQ ID NO: 2967 - DNA, 23 bp, Artificial Sequence
  Description of Artificial Sequence: Synthetic oligonucleotide
  Description of Combined DNA/RNA Molecule: Synthetic oligonucleotide
utggactggacguugcuaagauc

SEQ ID NO: 2968 - DNA, 23 bp, Artificial Sequence
  Description of Artificial Sequence: Synthetic oligonucleotide
  Description of Combined DNA/RNA Molecule: Synthetic oligonucleotide
utuggacuggacguugcuaagau

SEQ ID NO: 2969 - RNA, 23 nt, Artificial Sequence
  Description of Artificial Sequence: Synthetic oligonucleotide
ucuuggacuggacguugcuaaga

SEQ ID NO: 2970 - DNA, 23 bp, Artificial Sequence
  Description of Artificial Sequence: Synthetic oligonucleotide
  Description of Combined DNA/RNA Molecule: Synthetic oligonucleotide
uacutggacuggacguugcuaag

SEQ ID NO: 2971 - DNA, 23 bp, Artificial Sequence
  Description of Artificial Sequence: Synthetic oligonucleotide
  Description of Combined DNA/RNA Molecule: Synthetic oligonucleotide
ucactuggacuggacguugcuaa

SEQ ID NO: 2972 - DNA, 23 bp, Artificial Sequence
  Description of Artificial Sequence: Synthetic oligonucleotide
  Description of Combined DNA/RNA Molecule: Synthetic oligonucleotide
uacacutggactggacguugcua

SEQ ID NO: 2973 - DNA, 23 bp, Artificial Sequence
  Description of Artificial Sequence: Synthetic oligonucleotide
  Description of Combined DNA/RNA Molecule: Synthetic oligonucleotide
ucacactuggacuggacguugcu

SEQ ID NO: 2974 - RNA, 23 nt, Artificial Sequence
  Description of Artificial Sequence: Synthetic oligonucleotide
uccacacuuggacuggacguugc

SEQ ID NO: 2975 - RNA, 23 nt, Artificial Sequence
  Description of Artificial Sequence: Synthetic oligonucleotide
ugccacacuuggacuggacguug

SEQ ID NO: 2976 - RNA, 23 nt, Artificial Sequence
  Description of Artificial Sequence: Synthetic oligonucleotide
uagccacacuuggacuggacguu

SEQ ID NO: 2977 - DNA, 23 bp, Artificial Sequence
  Description of Artificial Sequence: Synthetic oligonucleotide
  Description of Combined DNA/RNA Molecule: Synthetic oligonucleotide
ugagccacacutggacuggacgu

SEQ ID NO: 2978 - DNA, 23 bp, Artificial Sequence
  Description of Artificial Sequence: Synthetic oligonucleotide
  Description of Combined DNA/RNA Molecule: Synthetic oligonucleotide
utgagccacactuggacuggacg

SEQ ID NO: 2979 - DNA, 23 bp, Artificial Sequence
  Description of Artificial Sequence: Synthetic oligonucleotide
  Description of Combined DNA/RNA Molecule: Synthetic oligonucleotide
utugagccacacuuggacuggac

SEQ ID NO: 2980 - DNA, 23 bp, Artificial Sequence
  Description of Artificial Sequence: Synthetic oligonucleotide
  Description of Combined DNA/RNA Molecule: Synthetic oligonucleotide
utuugagccacacuuggacugga

SEQ ID NO: 2981 - DNA, 23 bp, Artificial Sequence
  Description of Artificial Sequence: Synthetic oligonucleotide
  Description of Combined DNA/RNA Molecule: Synthetic oligonucleotide
ucuutgagccacacuuggacugg

SEQ ID NO: 2982 - DNA, 23 bp, Artificial Sequence
  Description of Artificial Sequence: Synthetic oligonucleotide
  Description of Combined DNA/RNA Molecule: Synthetic oligonucleotide
uccutugagccacacuuggacug

SEQ ID NO: 2983 - DNA, 23 bp, Artificial Sequence
  Description of Artificial Sequence: Synthetic oligonucleotide
  Description of Combined DNA/RNA Molecule: Synthetic oligonucleotide
utcctutgagccacacuuggacu

SEQ ID NO: 2984 - DNA, 23 bp, Artificial Sequence
  Description of Artificial Sequence: Synthetic oligonucleotide
  Description of Combined DNA/RNA Molecule: Synthetic oligonucleotide
uauccutugagccacacuuggac

SEQ ID NO: 2985 - DNA, 23 bp, Artificial Sequence
  Description of Artificial Sequence: Synthetic oligonucleotide
  Description of Combined DNA/RNA Molecule: Synthetic oligonucleotide
utaucctuugagccacacuugga

SEQ ID NO: 2986 - DNA, 23 bp, Artificial Sequence
  Description of Artificial Sequence: Synthetic oligonucleotide
  Description of Combined DNA/RNA Molecule: Synthetic oligonucleotide
utuatccuuugagccacacuugg

SEQ ID NO: 2987 - RNA, 23 nt, Artificial Sequence
  Description of Artificial Sequence: Synthetic oligonucleotide
uauuauccuuugagccacacuug

SEQ ID NO: 2988 - DNA, 23 bp, Artificial Sequence
  Description of Artificial Sequence: Synthetic oligonucleotide
  Description of Combined DNA/RNA Molecule: Synthetic oligonucleotide
utautatccuutgagccacacuu

SEQ ID NO: 2989 - DNA, 23 bp, Artificial Sequence
  Description of Artificial Sequence: Synthetic oligonucleotide
  Description of Combined DNA/RNA Molecule: Synthetic oligonucleotide
uauatuauccutugagccacacu

SEQ ID NO: 2990 - DNA, 23 bp, Artificial Sequence
  Description of Artificial Sequence: Synthetic oligonucleotide
  Description of Combined DNA/RNA Molecule: Synthetic oligonucleotide
ugauautaucctuugagccacac

SEQ ID NO: 2991 - DNA, 23 bp, Artificial Sequence
  Description of Artificial Sequence: Synthetic oligonucleotide
  Description of Combined DNA/RNA Molecule: Synthetic oligonucleotide
utgatatuauccuuugagccaca

SEQ ID NO: 2992 - DNA, 23 bp, Artificial Sequence
  Description of Artificial Sequence: Synthetic oligonucleotide
  Description of Combined DNA/RNA Molecule: Synthetic oligonucleotide
utugauauuauccuuugagccac

SEQ ID NO: 2993 - DNA, 23 bp, Artificial Sequence
  Description of Artificial Sequence: Synthetic oligonucleotide
  Description of Combined DNA/RNA Molecule: Synthetic oligonucleotide
utuugatauuatccuuugagcca

SEQ ID NO: 2994 - DNA, 23 bp, Artificial Sequence
  Description of Artificial Sequence: Synthetic oligonucleotide
  Description of Combined DNA/RNA Molecule: Synthetic oligonucleotide
uguutgauauuauccuuugagcc

SEQ ID NO: 2995 - DNA, 23 bp, Artificial Sequence
  Description of Artificial Sequence: Synthetic oligonucleotide
  Description of Combined DNA/RNA Molecule: Synthetic oligonucleotide
utgutugauautauccuuugagc

SEQ ID NO: 2996 - DNA, 23 bp, Artificial Sequence
  Description of Artificial Sequence: Synthetic oligonucleotide
  Description of Combined DNA/RNA Molecule: Synthetic oligonucleotide
ugugtutgauatuauccuuugag

SEQ ID NO: 2997 - DNA, 23 bp, Artificial Sequence
  Description of Artificial Sequence: Synthetic oligonucleotide
  Description of Combined DNA/RNA Molecule: Synthetic oligonucleotide
ucgugutugauauuauccuuuga

SEQ ID NO: 2998 - DNA, 23 bp, Artificial Sequence
  Description of Artificial Sequence: Synthetic oligonucleotide
  Description of Combined DNA/RNA Molecule: Synthetic oligonucleotide
uacgtgtuugatauuauccuuug

SEQ ID NO: 2999 - RNA, 23 nt, Artificial Sequence
  Description of Artificial Sequence: Synthetic oligonucleotide
ugacguguuugauauuauccuuu

SEQ ID NO: 3000 - DNA, 23 bp, Artificial Sequence
  Description of Artificial Sequence: Synthetic oligonucleotide
  Description of Combined DNA/RNA Molecule: Synthetic oligonucleotide
uggacgtguuugauauuauccuu

SEQ ID NO: 3001 - DNA, 23 bp, Artificial Sequence
  Description of Artificial Sequence: Synthetic oligonucleotide
  Description of Combined DNA/RNA Molecule: Synthetic oligonucleotide
ugggacguguutgauauuauccu

SEQ ID NO: 3002 - DNA, 23 bp, Artificial Sequence
  Description of Artificial Sequence: Synthetic oligonucleotide
  Description of Combined DNA/RNA Molecule: Synthetic oligonucleotide
ucgggacgugutugauauuaucc

SEQ ID NO: 3003 - DNA, 23 bp, Artificial Sequence
  Description of Artificial Sequence: Synthetic oligonucleotide
  Description of Combined DNA/RNA Molecule: Synthetic oligonucleotide
uccgggacgugtuugauauuauc

SEQ ID NO: 3004 - RNA, 23 nt, Artificial Sequence
  Description of Artificial Sequence: Synthetic oligonucleotide
ucccgggacguguuugauauuau

SEQ ID NO: 3005 - DNA, 23 bp, Artificial Sequence
  Description of Artificial Sequence: Synthetic oligonucleotide
  Description of Combined DNA/RNA Molecule: Synthetic oligonucleotide
utcccgggacgtguuugauauua

SEQ ID NO: 3006 - RNA, 23 nt, Artificial Sequence
  Description of Artificial Sequence: Synthetic oligonucleotide
ucucccgggacguguuugauauu

SEQ ID NO: 3007 - RNA, 23 nt, Artificial Sequence
  Description of Artificial Sequence: Synthetic oligonucleotide
uccucccgggacguguuugauau

SEQ ID NO: 3008 - DNA, 23 bp, Artificial Sequence
  Description of Artificial Sequence: Synthetic oligonucleotide
  Description of Combined DNA/RNA Molecule: Synthetic oligonucleotide
ugcctcccgggacguguuugaua

SEQ ID NO: 3009 - RNA, 23 nt, Artificial Sequence
  Description of Artificial Sequence: Synthetic oligonucleotide
ucgccucccgggacguguuugau

SEQ ID NO: 3010 - DNA, 23 bp, Artificial Sequence
  Description of Artificial Sequence: Synthetic oligonucleotide
  Description of Combined DNA/RNA Molecule: Synthetic oligonucleotide
uccgcctcccgggacguguuuga

SEQ ID NO: 3011 - RNA, 23 nt, Artificial Sequence
  Description of Artificial Sequence: Synthetic oligonucleotide
ugccgccucccgggacguguuug

SEQ ID NO: 3012 - RNA, 23 nt, Artificial Sequence
  Description of Artificial Sequence: Synthetic oligonucleotide
ucugccgccucccgggacguguu

SEQ ID NO: 3013 - RNA, 21 nt, Artificial Sequence
  Description of Artificial Sequence: Synthetic oligonucleotide
gcagauaauuaauaagaagca

SEQ ID NO: 3014 - RNA, 21 nt, Artificial Sequence
  Description of Artificial Sequence: Synthetic oligonucleotide
cagauaauuaauaagaagcua

SEQ ID NO: 3015 - RNA, 21 nt, Artificial Sequence
  Description of Artificial Sequence: Synthetic oligonucleotide
agauaauuaauaagaagcuga

SEQ ID NO: 3016 - RNA, 21 nt, Artificial Sequence
  Description of Artificial Sequence: Synthetic oligonucleotide
gauaauuaauaagaagcugga

SEQ ID NO: 3017 - RNA, 21 nt, Artificial Sequence
  Description of Artificial Sequence: Synthetic oligonucleotide
auaauuaauaagaagcuggaa

SEQ ID NO: 3018 - RNA, 21 nt, Artificial Sequence
  Description of Artificial Sequence: Synthetic oligonucleotide
uaauuaauaagaagcuggaua

SEQ ID NO: 3019 - RNA, 21 nt, Artificial Sequence
  Description of Artificial Sequence: Synthetic oligonucleotide
aauuaauaagaagcuggauca

SEQ ID NO: 3020 - RNA, 21 nt, Artificial Sequence
  Description of Artificial Sequence: Synthetic oligonucleotide
auuaauaagaagcuggaucua

SEQ ID NO: 3021 - RNA, 21 nt, Artificial Sequence
  Description of Artificial Sequence: Synthetic oligonucleotide
uuaauaagaagcuggaucuua

SEQ ID NO: 3022 - RNA, 21 nt, Artificial Sequence
  Description of Artificial Sequence: Synthetic oligonucleotide
uaauaagaagcuggaucuuaa

SEQ ID NO: 3023 - RNA, 21 nt, Artificial Sequence
  Description of Artificial Sequence: Synthetic oligonucleotide
aauaagaagcuggaucuuaga

SEQ ID NO: 3024 - RNA, 21 nt, Artificial Sequence
  Description of Artificial Sequence: Synthetic oligonucleotide
auaagaagcuggaucuuagca

SEQ ID NO: 3025 - RNA, 21 nt, Artificial Sequence
  Description of Artificial Sequence: Synthetic oligonucleotide
uaagaagcuggaucuuagcaa

SEQ ID NO: 3026 - RNA, 21 nt, Artificial Sequence
  Description of Artificial Sequence: Synthetic oligonucleotide
aagaagcuggaucuuagcaaa

SEQ ID NO: 3027 - RNA, 21 nt, Artificial Sequence
  Description of Artificial Sequence: Synthetic oligonucleotide
agaagcuggaucuuagcaaca

SEQ ID NO: 3028 - RNA, 21 nt, Artificial Sequence
  Description of Artificial Sequence: Synthetic oligonucleotide
gaagcuggaucuuagcaacga

SEQ ID NO: 3029 - RNA, 21 nt, Artificial Sequence
  Description of Artificial Sequence: Synthetic oligonucleotide
aagcuggaucuuagcaacgua

SEQ ID NO: 3030 - RNA, 21 nt, Artificial Sequence
  Description of Artificial Sequence: Synthetic oligonucleotide
agcuggaucuuagcaacguca

SEQ ID NO: 3031 - RNA, 21 nt, Artificial Sequence
  Description of Artificial Sequence: Synthetic oligonucleotide
gcuggaucuuagcaacgucca

SEQ ID NO: 3032 - RNA, 21 nt, Artificial Sequence
  Description of Artificial Sequence: Synthetic oligonucleotide
cuggaucuuagcaacguccaa

SEQ ID NO: 3033 - RNA, 21 nt, Artificial Sequence
  Description of Artificial Sequence: Synthetic oligonucleotide
uggaucuuagcaacguccaga

SEQ ID NO: 3034 - RNA, 21 nt, Artificial Sequence
  Description of Artificial Sequence: Synthetic oligonucleotide
ggaucuuagcaacguccagua

SEQ ID NO: 3035 - RNA, 21 nt, Artificial Sequence
  Description of Artificial Sequence: Synthetic oligonucleotide
gaucuuagcaacguccaguca

SEQ ID NO: 3036 - RNA, 21 nt, Artificial Sequence
  Description of Artificial Sequence: Synthetic oligonucleotide
aucuuagcaacguccagucca

SEQ ID NO: 3037 - RNA, 21 nt, Artificial Sequence
  Description of Artificial Sequence: Synthetic oligonucleotide
ucuuagcaacguccaguccaa

SEQ ID NO: 3038 - RNA, 21 nt, Artificial Sequence
  Description of Artificial Sequence: Synthetic oligonucleotide
cuuagcaacguccaguccaaa

SEQ ID NO: 3039 - RNA, 21 nt, Artificial Sequence
  Description of Artificial Sequence: Synthetic oligonucleotide
uuagcaacguccaguccaaga

SEQ ID NO: 3040 - RNA, 21 nt, Artificial Sequence
  Description of Artificial Sequence: Synthetic oligonucleotide
uagcaacguccaguccaagua

SEQ ID NO: 3041 - RNA, 21 nt, Artificial Sequence
  Description of Artificial Sequence: Synthetic oligonucleotide
agcaacguccaguccaaguga

SEQ ID NO: 3042 - RNA, 21 nt, Artificial Sequence
  Description of Artificial Sequence: Synthetic oligonucleotide
gcaacguccaguccaagugua

SEQ ID NO: 3043 - RNA, 21 nt, Artificial Sequence
  Description of Artificial Sequence: Synthetic oligonucleotide
caacguccaguccaaguguga

SEQ ID NO: 3044 - RNA, 21 nt, Artificial Sequence
  Description of Artificial Sequence: Synthetic oligonucleotide
aacguccaguccaagugugga

SEQ ID NO: 3045 - RNA, 21 nt, Artificial Sequence
  Description of Artificial Sequence: Synthetic oligonucleotide
acguccaguccaaguguggca

SEQ ID NO: 3046 - RNA, 21 nt, Artificial Sequence
  Description of Artificial Sequence: Synthetic oligonucleotide
cguccaguccaaguguggcua

SEQ ID NO: 3047 - RNA, 21 nt, Artificial Sequence
  Description of Artificial Sequence: Synthetic oligonucleotide
guccaguccaaguguggcuca

SEQ ID NO: 3048 - RNA, 21 nt, Artificial Sequence
  Description of Artificial Sequence: Synthetic oligonucleotide
uccaguccaaguguggcucaa

SEQ ID NO: 3049 - RNA, 21 nt, Artificial Sequence
  Description of Artificial Sequence: Synthetic oligonucleotide
ccaguccaaguguggcucaaa

SEQ ID NO: 3050 - RNA, 21 nt, Artificial Sequence
  Description of Artificial Sequence: Synthetic oligonucleotide
caguccaaguguggcucaaaa

SEQ ID NO: 3051 - RNA, 21 nt, Artificial Sequence
  Description of Artificial Sequence: Synthetic oligonucleotide
aguccaaguguggcucaaaga

SEQ ID NO: 3052 - RNA, 21 nt, Artificial Sequence
  Description of Artificial Sequence: Synthetic oligonucleotide
guccaaguguggcucaaagga

SEQ ID NO: 3053 - RNA, 21 nt, Artificial Sequence
  Description of Artificial Sequence: Synthetic oligonucleotide
uccaaguguggcucaaaggaa

SEQ ID NO: 3054 - RNA, 21 nt, Artificial Sequence
  Description of Artificial Sequence: Synthetic oligonucleotide
ccaaguguggcucaaaggaua

SEQ ID NO: 3055 - RNA, 21 nt, Artificial Sequence
  Description of Artificial Sequence: Synthetic oligonucleotide
caaguguggcucaaaggauaa

SEQ ID NO: 3056 - RNA, 21 nt, Artificial Sequence
  Description of Artificial Sequence: Synthetic oligonucleotide
aaguguggcucaaaggauaaa

SEQ ID NO: 3057 - RNA, 21 nt, Artificial Sequence
  Description of Artificial Sequence: Synthetic oligonucleotide
aguguggcucaaaggauaaua

SEQ ID NO: 3058 - RNA, 21 nt, Artificial Sequence
  Description of Artificial Sequence: Synthetic oligonucleotide
guguggcucaaaggauaauaa

SEQ ID NO: 3059 - RNA, 21 nt, Artificial Sequence
  Description of Artificial Sequence: Synthetic oligonucleotide
uguggcucaaaggauaauaua

SEQ ID NO: 3060 - RNA, 21 nt, Artificial Sequence
  Description of Artificial Sequence: Synthetic oligonucleotide
guggcucaaaggauaauauca

SEQ ID NO: 3061 - RNA, 21 nt, Artificial Sequence
  Description of Artificial Sequence: Synthetic oligonucleotide
uggcucaaaggauaauaucaa

SEQ ID NO: 3062 - RNA, 21 nt, Artificial Sequence
  Description of Artificial Sequence: Synthetic oligonucleotide
ggcucaaaggauaauaucaaa

SEQ ID NO: 3063 - RNA, 21 nt, Artificial Sequence
  Description of Artificial Sequence: Synthetic oligonucleotide
gcucaaaggauaauaucaaaa

SEQ ID NO: 3064 - RNA, 21 nt, Artificial Sequence
  Description of Artificial Sequence: Synthetic oligonucleotide
cucaaaggauaauaucaaaca

SEQ ID NO: 3065 - RNA, 21 nt, Artificial Sequence
  Description of Artificial Sequence: Synthetic oligonucleotide
ucaaaggauaauaucaaacaa

SEQ ID NO: 3066 - RNA, 21 nt, Artificial Sequence
  Description of Artificial Sequence: Synthetic oligonucleotide
caaaggauaauaucaaacaca

SEQ ID NO: 3067 - RNA, 21 nt, Artificial Sequence
  Description of Artificial Sequence: Synthetic oligonucleotide
aaaggauaauaucaaacacga

SEQ ID NO: 3068 - RNA, 21 nt, Artificial Sequence
  Description of Artificial Sequence: Synthetic oligonucleotide
aaggauaauaucaaacacgua

SEQ ID NO: 3069 - RNA, 21 nt, Artificial Sequence
  Description of Artificial Sequence: Synthetic oligonucleotide
aggauaauaucaaacacguca

SEQ ID NO: 3070 - RNA, 21 nt, Artificial Sequence
  Description of Artificial Sequence: Synthetic oligonucleotide
ggauaauaucaaacacgucca

SEQ ID NO: 3071 - RNA, 21 nt, Artificial Sequence
  Description of Artificial Sequence: Synthetic oligonucleotide
gauaauaucaaacacguccca

SEQ ID NO: 3072 - RNA, 21 nt, Artificial Sequence
  Description of Artificial Sequence: Synthetic oligonucleotide
auaauaucaaacacgucccga

SEQ ID NO: 3073 - RNA, 21 nt, Artificial Sequence
  Description of Artificial Sequence: Synthetic oligonucleotide
uaauaucaaacacgucccgga

SEQ ID NO: 3074 - RNA, 21 nt, Artificial Sequence
  Description of Artificial Sequence: Synthetic oligonucleotide
aauaucaaacacgucccggga

SEQ ID NO: 3075 - RNA, 21 nt, Artificial Sequence
  Description of Artificial Sequence: Synthetic oligonucleotide
auaucaaacacgucccgggaa

SEQ ID NO: 3076 - RNA, 21 nt, Artificial Sequence
  Description of Artificial Sequence: Synthetic oligonucleotide
uaucaaacacgucccgggaga

SEQ ID NO: 3077 - RNA, 21 nt, Artificial Sequence
  Description of Artificial Sequence: Synthetic oligonucleotide
aucaaacacgucccgggagga

SEQ ID NO: 3078 - RNA, 21 nt, Artificial Sequence
  Description of Artificial Sequence: Synthetic oligonucleotide
ucaaacacgucccgggaggca

SEQ ID NO: 3079 - RNA, 21 nt, Artificial Sequence
  Description of Artificial Sequence: Synthetic oligonucleotide
caaacacgucccgggaggcga

SEQ ID NO: 3080 - RNA, 21 nt, Artificial Sequence
  Description of Artificial Sequence: Synthetic oligonucleotide
aaacacgucccgggaggcgga

SEQ ID NO: 3081 - RNA, 21 nt, Artificial Sequence
  Description of Artificial Sequence: Synthetic oligonucleotide
aacacgucccgggaggcggca

SEQ ID NO: 3082 - RNA, 21 nt, Artificial Sequence
  Description of Artificial Sequence: Synthetic oligonucleotide
cacgucccgggaggcggcaga

SEQ ID NO: 3083 - DNA, 23 bp, Artificial Sequence
  Description of Artificial Sequence: Synthetic oligonucleotide
  Description of Combined DNA/RNA Molecule: Synthetic oligonucleotide
ugcutctuauuaauuaucugcac

SEQ ID NO: 3084 - DNA, 23 bp, Artificial Sequence
  Description of Artificial Sequence: Synthetic oligonucleotide
  Description of Combined DNA/RNA Molecule: Synthetic oligonucleotide
uagctucuuautaauuaucugca

SEQ ID NO: 3085 - DNA, 23 bp, Artificial Sequence
  Description of Artificial Sequence: Synthetic oligonucleotide
  Description of Combined DNA/RNA Molecule: Synthetic oligonucleotide
ucagcutcuuatuaauuaucugc

SEQ ID NO: 3086 - DNA, 23 bp, Artificial Sequence
  Description of Artificial Sequence: Synthetic oligonucleotide
  Description of Combined DNA/RNA Molecule: Synthetic oligonucleotide
uccagctucuuauuaauuaucug

SEQ ID NO: 3087 - DNA, 23 bp, Artificial Sequence
  Description of Artificial Sequence: Synthetic oligonucleotide
  Description of Combined DNA/RNA Molecule: Synthetic oligonucleotide
utccagcuucutauuaauuaucu

SEQ ID NO: 3088 - DNA, 23 bp, Artificial Sequence
  Description of Artificial Sequence: Synthetic oligonucleotide
  Description of Combined DNA/RNA Molecule: Synthetic oligonucleotide
uauccagcuuctuauuaauuauc

SEQ ID NO: 3089 - DNA, 23 bp, Artificial Sequence
  Description of Artificial Sequence: Synthetic oligonucleotide
  Description of Combined DNA/RNA Molecule: Synthetic oligonucleotide
ugauccagcuucuuauuaauuau

SEQ ID NO: 3090 - DNA, 23 bp, Artificial Sequence
  Description of Artificial Sequence: Synthetic oligonucleotide
  Description of Combined DNA/RNA Molecule: Synthetic oligonucleotide
uagatccagcutcuuauuaauua

SEQ ID NO: 3091 - DNA, 23 bp, Artificial Sequence
  Description of Artificial Sequence: Synthetic oligonucleotide
  Description of Combined DNA/RNA Molecule: Synthetic oligonucleotide
uaagauccagctucuuauuaauu

SEQ ID NO: 3092 - DNA, 23 bp, Artificial Sequence
  Description of Artificial Sequence: Synthetic oligonucleotide
  Description of Combined DNA/RNA Molecule: Synthetic oligonucleotide
utaagatccagcuucuuauuaau

SEQ ID NO: 3093 - DNA, 23 bp, Artificial Sequence
  Description of Artificial Sequence: Synthetic oligonucleotide
  Description of Combined DNA/RNA Molecule: Synthetic oligonucleotide
ucuaagauccagcuucuuauuaa

SEQ ID NO: 3094 - DNA, 23 bp, Artificial Sequence
  Description of Artificial Sequence: Synthetic oligonucleotide
  Description of Combined DNA/RNA Molecule: Synthetic oligonucleotide
ugcuaagauccagcuucuuauua

SEQ ID NO: 3095 - DNA, 23 bp, Artificial Sequence
  Description of Artificial Sequence: Synthetic oligonucleotide
  Description of Combined DNA/RNA Molecule: Synthetic oligonucleotide
utgctaagauccagcuucuuauu

SEQ ID NO: 3096 - DNA, 23 bp, Artificial Sequence
  Description of Artificial Sequence: Synthetic oligonucleotide
  Description of Combined DNA/RNA Molecule: Synthetic oligonucleotide
utugcuaagauccagcuucuuau

SEQ ID NO: 3097 - DNA, 23 bp, Artificial Sequence
  Description of Artificial Sequence: Synthetic oligonucleotide
  Description of Combined DNA/RNA Molecule: Synthetic oligonucleotide
uguugctaagatccagcuucuua

SEQ ID NO: 3098 - DNA, 23 bp, Artificial Sequence
  Description of Artificial Sequence: Synthetic oligonucleotide
  Description of Combined DNA/RNA Molecule: Synthetic oligonucleotide
ucgutgcuaagauccagcuucuu

SEQ ID NO: 3099 - DNA, 23 bp, Artificial Sequence
  Description of Artificial Sequence: Synthetic oligonucleotide
  Description of Combined DNA/RNA Molecule: Synthetic oligonucleotide
uacgtugcuaagauccagcuucu

SEQ ID NO: 3100 - DNA, 23 bp, Artificial Sequence
  Description of Artificial Sequence: Synthetic oligonucleotide
  Description of Combined DNA/RNA Molecule: Synthetic oligonucleotide
ugacgutgcuaagauccagcuuc

SEQ ID NO: 3101 - DNA, 23 bp, Artificial Sequence
  Description of Artificial Sequence: Synthetic oligonucleotide
  Description of Combined DNA/RNA Molecule: Synthetic oligonucleotide
uggacgtugcuaagauccagcuu

SEQ ID NO: 3102 - DNA, 23 bp, Artificial Sequence
  Description of Artificial Sequence: Synthetic oligonucleotide
  Description of Combined DNA/RNA Molecule: Synthetic oligonucleotide
utggacguugctaagauccagcu

SEQ ID NO: 3103 - DNA, 23 bp, Artificial Sequence
  Description of Artificial Sequence: Synthetic oligonucleotide
  Description of Combined DNA/RNA Molecule: Synthetic oligonucleotide
ucuggacguugcuaagauccagc

SEQ ID NO: 3104 - DNA, 23 bp, Artificial Sequence
  Description of Artificial Sequence: Synthetic oligonucleotide
  Description of Combined DNA/RNA Molecule: Synthetic oligonucleotide
uacuggacguugcuaagauccag

SEQ ID NO: 3105 - DNA, 23 bp, Artificial Sequence
  Description of Artificial Sequence: Synthetic oligonucleotide
  Description of Combined DNA/RNA Molecule: Synthetic oligonucleotide
ugactggacgutgcuaagaucca

SEQ ID NO: 3106 - DNA, 23 bp, Artificial Sequence
  Description of Artificial Sequence: Synthetic oligonucleotide
  Description of Combined DNA/RNA Molecule: Synthetic oligonucleotide
uggacuggacgtugcuaagaucc

SEQ ID NO: 3107 - DNA, 23 bp, Artificial Sequence
  Description of Artificial Sequence: Synthetic oligonucleotide
  Description of Combined DNA/RNA Molecule: Synthetic oligonucleotide
utggactggacguugcuaagauc

SEQ ID NO: 3108 - DNA, 23 bp, Artificial Sequence
  Description of Artificial Sequence: Synthetic oligonucleotide
  Description of Combined DNA/RNA Molecule: Synthetic oligonucleotide
utuggacuggacguugcuaagau

SEQ ID NO: 3109 - DNA, 23 bp, Artificial Sequence
  Description of Artificial Sequence: Synthetic oligonucleotide
  Description of Combined DNA/RNA Molecule: Synthetic oligonucleotide
ucuuggacuggacguugcuaaga

SEQ ID NO: 3110 - DNA, 23 bp, Artificial Sequence
  Description of Artificial Sequence: Synthetic oligonucleotide
  Description of Combined DNA/RNA Molecule: Synthetic oligonucleotide
uacutggacuggacguugcuaag

SEQ ID NO: 3111 - DNA, 23 bp, Artificial Sequence
  Description of Artificial Sequence: Synthetic oligonucleotide
  Description of Combined DNA/RNA Molecule: Synthetic oligonucleotide
ucactuggacuggacguugcuaa

SEQ ID NO: 3112 - DNA, 23 bp, Artificial Sequence
  Description of Artificial Sequence: Synthetic oligonucleotide
  Description of Combined DNA/RNA Molecule: Synthetic oligonucleotide
uacacutggactggacguugcua

SEQ ID NO: 3113 - DNA, 23 bp, Artificial Sequence
  Description of Artificial Sequence: Synthetic oligonucleotide
  Description of Combined DNA/RNA Molecule: Synthetic oligonucleotide
ucacactuggacuggacguugcu

SEQ ID NO: 3114 - DNA, 23 bp, Artificial Sequence
  Description of Artificial Sequence: Synthetic oligonucleotide
  Description of Combined DNA/RNA Molecule: Synthetic oligonucleotide
uccacacuuggacuggacguugc

SEQ ID NO: 3115 - DNA, 23 bp, Artificial Sequence
  Description of Artificial Sequence: Synthetic oligonucleotide
  Description of Combined DNA/RNA Molecule: Synthetic oligonucleotide
ugccacacuuggacuggacguug

SEQ ID NO: 3116 - DNA, 23 bp, Artificial Sequence
  Description of Artificial Sequence: Synthetic oligonucleotide
  Description of Combined DNA/RNA Molecule: Synthetic oligonucleotide
uagccacacuuggacuggacguu

SEQ ID NO: 3117 - DNA, 23 bp, Artificial Sequence
  Description of Artificial Sequence: Synthetic oligonucleotide
  Description of Combined DNA/RNA Molecule: Synthetic oligonucleotide
ugagccacacutggacuggacgu

SEQ ID NO: 3118 - DNA, 23 bp, Artificial Sequence
  Description of Artificial Sequence: Synthetic oligonucleotide
  Description of Combined DNA/RNA Molecule: Synthetic oligonucleotide
utgagccacactuggacuggacg

SEQ ID NO: 3119 - DNA, 23 bp, Artificial Sequence
  Description of Artificial Sequence: Synthetic oligonucleotide
  Description of Combined DNA/RNA Molecule: Synthetic oligonucleotide
utugagccacacuuggacuggac

SEQ ID NO: 3120 - DNA, 23 bp, Artificial Sequence
  Description of Artificial Sequence: Synthetic oligonucleotide
  Description of Combined DNA/RNA Molecule: Synthetic oligonucleotide
utuugagccacacuuggacugga

SEQ ID NO: 3121 - DNA, 23 bp, Artificial Sequence
  Description of Artificial Sequence: Synthetic oligonucleotide
  Description of Combined DNA/RNA Molecule: Synthetic oligonucleotide
ucuutgagccacacuuggacugg

SEQ ID NO: 3122 - DNA, 23 bp, Artificial Sequence
  Description of Artificial Sequence: Synthetic oligonucleotide
  Description of Combined DNA/RNA Molecule: Synthetic oligonucleotide
uccutugagccacacuuggacug

SEQ ID NO: 3123 - DNA, 23 bp, Artificial Sequence
  Description of Artificial Sequence: Synthetic oligonucleotide
  Description of Combined DNA/RNA Molecule: Synthetic oligonucleotide
utcctutgagccacacuuggacu

SEQ ID NO: 3124 - DNA, 23 bp, Artificial Sequence
  Description of Artificial Sequence: Synthetic oligonucleotide
  Description of Combined DNA/RNA Molecule: Synthetic oligonucleotide
uauccutugagccacacuuggac

SEQ ID NO: 3125 - DNA, 23 bp, Artificial Sequence
  Description of Artificial Sequence: Synthetic oligonucleotide
  Description of Combined DNA/RNA Molecule: Synthetic oligonucleotide
utaucctuugagccacacuugga

SEQ ID NO: 3126 - DNA, 23 bp, Artificial Sequence
  Description of Artificial Sequence: Synthetic oligonucleotide
  Description of Combined DNA/RNA Molecule: Synthetic oligonucleotide
utuatccuuugagccacacuugg

SEQ ID NO: 3127 - DNA, 23 bp, Artificial Sequence
  Description of Artificial Sequence: Synthetic oligonucleotide
  Description of Combined DNA/RNA Molecule: Synthetic oligonucleotide
uauuauccuuugagccacacuug

SEQ ID NO: 3128 - DNA, 23 bp, Artificial Sequence
  Description of Artificial Sequence: Synthetic oligonucleotide
  Description of Combined DNA/RNA Molecule: Synthetic oligonucleotide
utautatccuutgagccacacuu

SEQ ID NO: 3129 - DNA, 23 bp, Artificial Sequence
  Description of Artificial Sequence: Synthetic oligonucleotide
  Description of Combined DNA/RNA Molecule: Synthetic oligonucleotide
uauatuauccutugagccacacu

SEQ ID NO: 3130 - DNA, 23 bp, Artificial Sequence
  Description of Artificial Sequence: Synthetic oligonucleotide
  Description of Combined DNA/RNA Molecule: Synthetic oligonucleotide
ugauautaucctuugagccacac

SEQ ID NO: 3131 - DNA, 23 bp, Artificial Sequence
  Description of Artificial Sequence: Synthetic oligonucleotide
  Description of Combined DNA/RNA Molecule: Synthetic oligonucleotide
utgatatuauccuuugagccaca

SEQ ID NO: 3132 - DNA, 23 bp, Artificial Sequence
  Description of Artificial Sequence: Synthetic oligonucleotide
  Description of Combined DNA/RNA Molecule: Synthetic oligonucleotide
utugauauuauccuuugagccac

SEQ ID NO: 3133 - DNA, 23 bp, Artificial Sequence
  Description of Artificial Sequence: Synthetic oligonucleotide
  Description of Combined DNA/RNA Molecule: Synthetic oligonucleotide
utuugatauuatccuuugagcca

SEQ ID NO: 3134 - DNA, 23 bp, Artificial Sequence
  Description of Artificial Sequence: Synthetic oligonucleotide
  Description of Combined DNA/RNA Molecule: Synthetic oligonucleotide
uguutgauauuauccuuugagcc

SEQ ID NO: 3135 - DNA, 23 bp, Artificial Sequence
  Description of Artificial Sequence: Synthetic oligonucleotide
  Description of Combined DNA/RNA Molecule: Synthetic oligonucleotide
utgutugauautauccuuugagc

SEQ ID NO: 3136 - DNA, 23 bp, Artificial Sequence
  Description of Artificial Sequence: Synthetic oligonucleotide
  Description of Combined DNA/RNA Molecule: Synthetic oligonucleotide
ugugtutgauatuauccuuugag

SEQ ID NO: 3137 - DNA, 23 bp, Artificial Sequence
  Description of Artificial Sequence: Synthetic oligonucleotide
  Description of Combined DNA/RNA Molecule: Synthetic oligonucleotide
ucgugutugauauuauccuuuga

SEQ ID NO: 3138 - DNA, 23 bp, Artificial Sequence
  Description of Artificial Sequence: Synthetic oligonucleotide
  Description of Combined DNA/RNA Molecule: Synthetic oligonucleotide
uacgtgtuugatauuauccuuug

SEQ ID NO: 3139 - DNA, 23 bp, Artificial Sequence
  Description of Artificial Sequence: Synthetic oligonucleotide
  Description of Combined DNA/RNA Molecule: Synthetic oligonucleotide
ugacguguuugauauuauccuuu

SEQ ID NO: 3140 - DNA, 23 bp, Artificial Sequence
  Description of Artificial Sequence: Synthetic oligonucleotide
  Description of Combined DNA/RNA Molecule: Synthetic oligonucleotide
uggacgtguuugauauuauccuu

SEQ ID NO: 3141 - DNA, 23 bp, Artificial Sequence
  Description of Artificial Sequence: Synthetic oligonucleotide
  Description of Combined DNA/RNA Molecule: Synthetic oligonucleotide
ugggacguguutgauauuauccu

SEQ ID NO: 3142 - DNA, 23 bp, Artificial Sequence
  Description of Artificial Sequence: Synthetic oligonucleotide
  Description of Combined DNA/RNA Molecule: Synthetic oligonucleotide
ucgggacgugutugauauuaucc

SEQ ID NO: 3143 - DNA, 23 bp, Artificial Sequence
  Description of Artificial Sequence: Synthetic oligonucleotide
  Description of Combined DNA/RNA Molecule: Synthetic oligonucleotide
uccgggacgugtuugauauuauc

SEQ ID NO: 3144 - DNA, 23 bp, Artificial Sequence
  Description of Artificial Sequence: Synthetic oligonucleotide
  Description of Combined DNA/RNA Molecule: Synthetic oligonucleotide
ucccgggacguguuugauauuau

SEQ ID NO: 3145 - DNA, 23 bp, Artificial Sequence
  Description of Artificial Sequence: Synthetic oligonucleotide
  Description of Combined DNA/RNA Molecule: Synthetic oligonucleotide
utcccgggacgtguuugauauua

SEQ ID NO: 3146 - DNA, 23 bp, Artificial Sequence
  Description of Artificial Sequence: Synthetic oligonucleotide
  Description of Combined DNA/RNA Molecule: Synthetic oligonucleotide
ucucccgggacguguuugauauu

SEQ ID NO: 3147 - DNA, 23 bp, Artificial Sequence
  Description of Artificial Sequence: Synthetic oligonucleotide
  Description of Combined DNA/RNA Molecule: Synthetic oligonucleotide
uccucccgggacguguuugauau

SEQ ID NO: 3148 - DNA, 23 bp, Artificial Sequence
  Description of Artificial Sequence: Synthetic oligonucleotide
  Description of Combined DNA/RNA Molecule: Synthetic oligonucleotide
ugcctcccgggacguguuugaua

SEQ ID NO: 3149 - DNA, 23 bp, Artificial Sequence
  Description of Artificial Sequence: Synthetic oligonucleotide
  Description of Combined DNA/RNA Molecule: Synthetic oligonucleotide
ucgccucccgggacguguuugau

SEQ ID NO: 3150 - DNA, 23 bp, Artificial Sequence
  Description of Artificial Sequence: Synthetic oligonucleotide
  Description of Combined DNA/RNA Molecule: Synthetic oligonucleotide
uccgcctcccgggacguguuuga

SEQ ID NO: 3151 - DNA, 23 bp, Artificial Sequence
  Description of Artificial Sequence: Synthetic oligonucleotide
  Description of Combined DNA/RNA Molecule: Synthetic oligonucleotide
ugccgccucccgggacguguuug

SEQ ID NO: 3152 - DNA, 23 bp, Artificial Sequence
  Description of Artificial Sequence: Synthetic oligonucleotide
  Description of Combined DNA/RNA Molecule: Synthetic oligonucleotide
ucugccgccucccgggacguguu

SEQ ID NO: 3153 - RNA, 23 nt, Artificial Sequence
  Description of Artificial Sequence: Synthetic oligonucleotide
gugcagauaauuaauaagaagcu

SEQ ID NO: 3154 - RNA, 23 nt, Artificial Sequence
  Description of Artificial Sequence: Synthetic oligonucleotide
ugcagauaauuaauaagaagcug

SEQ ID NO: 3155 - RNA, 23 nt, Artificial Sequence
  Description of Artificial Sequence: Synthetic oligonucleotide
gcagauaauuaauaagaagcugg

SEQ ID NO: 3156 - RNA, 23 nt, Artificial Sequence
  Description of Artificial Sequence: Synthetic oligonucleotide
cagauaauuaauaagaagcugga

SEQ ID NO: 3157 - RNA, 23 nt, Artificial Sequence
  Description of Artificial Sequence: Synthetic oligonucleotide
agauaauuaauaagaagcuggau

SEQ ID NO: 3158 - RNA, 23 nt, Artificial Sequence
  Description of Artificial Sequence: Synthetic oligonucleotide
gauaauuaauaagaagcuggauc

SEQ ID NO: 3159 - RNA, 23 nt, Artificial Sequence
  Description of Artificial Sequence: Synthetic oligonucleotide
auaauuaauaagaagcuggaucu

SEQ ID NO: 3160 - RNA, 23 nt, Artificial Sequence
  Description of Artificial Sequence: Synthetic oligonucleotide
uaauuaauaagaagcuggaucuu

SEQ ID NO: 3161 - RNA, 23 nt, Artificial Sequence
  Description of Artificial Sequence: Synthetic oligonucleotide
aauuaauaagaagcuggaucuua

SEQ ID NO: 3162 - RNA, 23 nt, Artificial Sequence
  Description of Artificial Sequence: Synthetic oligonucleotide
auuaauaagaagcuggaucuuag

SEQ ID NO: 3163 - RNA, 23 nt, Artificial Sequence
  Description of Artificial Sequence: Synthetic oligonucleotide
uuaauaagaagcuggaucuuagc

SEQ ID NO: 3164 - RNA, 23 nt, Artificial Sequence
  Description of Artificial Sequence: Synthetic oligonucleotide
uaauaagaagcuggaucuuagca

SEQ ID NO: 3165 - RNA, 23 nt, Artificial Sequence
  Description of Artificial Sequence: Synthetic oligonucleotide
aauaagaagcuggaucuuagcaa

SEQ ID NO: 3166 - RNA, 23 nt, Artificial Sequence
  Description of Artificial Sequence: Synthetic oligonucleotide
auaagaagcuggaucuuagcaac

SEQ ID NO: 3167 - RNA, 23 nt, Artificial Sequence
  Description of Artificial Sequence: Synthetic oligonucleotide
uaagaagcuggaucuuagcaacg

SEQ ID NO: 3168 - RNA, 23 nt, Artificial Sequence
  Description of Artificial Sequence: Synthetic oligonucleotide
aagaagcuggaucuuagcaacgu

SEQ ID NO: 3169 - RNA, 23 nt, Artificial Sequence
  Description of Artificial Sequence: Synthetic oligonucleotide
agaagcuggaucuuagcaacguc

SEQ ID NO: 3170 - RNA, 23 nt, Artificial Sequence
  Description of Artificial Sequence: Synthetic oligonucleotide
gaagcuggaucuuagcaacgucc

SEQ ID NO: 3171 - RNA, 23 nt, Artificial Sequence
  Description of Artificial Sequence: Synthetic oligonucleotide
aagcuggaucuuagcaacgucca

SEQ ID NO: 3172 - RNA, 23 nt, Artificial Sequence
  Description of Artificial Sequence: Synthetic oligonucleotide
agcuggaucuuagcaacguccag

SEQ ID NO: 3173 - RNA, 23 nt, Artificial Sequence
  Description of Artificial Sequence: Synthetic oligonucleotide
gcuggaucuuagcaacguccagu

SEQ ID NO: 3174 - RNA, 23 nt, Artificial Sequence
  Description of Artificial Sequence: Synthetic oligonucleotide
cuggaucuuagcaacguccaguc

SEQ ID NO: 3175 - RNA, 23 nt, Artificial Sequence
  Description of Artificial Sequence: Synthetic oligonucleotide
uggaucuuagcaacguccagucc

SEQ ID NO: 3176 - RNA, 23 nt, Artificial Sequence
  Description of Artificial Sequence: Synthetic oligonucleotide
ggaucuuagcaacguccagucca

SEQ ID NO: 3177 - RNA, 23 nt, Artificial Sequence
  Description of Artificial Sequence: Synthetic oligonucleotide
gaucuuagcaacguccaguccaa

SEQ ID NO: 3178 - RNA, 23 nt, Artificial Sequence
  Description of Artificial Sequence: Synthetic oligonucleotide
aucuuagcaacguccaguccaag

SEQ ID NO: 3179 - RNA, 23 nt, Artificial Sequence
  Description of Artificial Sequence: Synthetic oligonucleotide
ucuuagcaacguccaguccaagu

SEQ ID NO: 3180 - RNA, 23 nt, Artificial Sequence
  Description of Artificial Sequence: Synthetic oligonucleotide
cuuagcaacguccaguccaagug

SEQ ID NO: 3181 - RNA, 23 nt, Artificial Sequence
  Description of Artificial Sequence: Synthetic oligonucleotide
uuagcaacguccaguccaagugu

SEQ ID NO: 3182 - RNA, 23 nt, Artificial Sequence
  Description of Artificial Sequence: Synthetic oligonucleotide
uagcaacguccaguccaagugug

SEQ ID NO: 3183 - RNA, 23 nt, Artificial Sequence
  Description of Artificial Sequence: Synthetic oligonucleotide
agcaacguccaguccaagugugg

SEQ ID NO: 3184 - RNA, 23 nt, Artificial Sequence
  Description of Artificial Sequence: Synthetic oligonucleotide
gcaacguccaguccaaguguggc

SEQ ID NO: 3185 - RNA, 23 nt, Artificial Sequence
  Description of Artificial Sequence: Synthetic oligonucleotide
caacguccaguccaaguguggcu

SEQ ID NO: 3186 - RNA, 23 nt, Artificial Sequence
  Description of Artificial Sequence: Synthetic oligonucleotide
aacguccaguccaaguguggcuc

SEQ ID NO: 3187 - RNA, 23 nt, Artificial Sequence
  Description of Artificial Sequence: Synthetic oligonucleotide
acguccaguccaaguguggcuca

SEQ ID NO: 3188 - RNA, 23 nt, Artificial Sequence
  Description of Artificial Sequence: Synthetic oligonucleotide
cguccaguccaaguguggcucaa

SEQ ID NO: 3189 - RNA, 23 nt, Artificial Sequence
  Description of Artificial Sequence: Synthetic oligonucleotide
guccaguccaaguguggcucaaa

SEQ ID NO: 3190 - RNA, 23 nt, Artificial Sequence
  Description of Artificial Sequence: Synthetic oligonucleotide
uccaguccaaguguggcucaaag

SEQ ID NO: 3191 - RNA, 23 nt, Artificial Sequence
  Description of Artificial Sequence: Synthetic oligonucleotide
ccaguccaaguguggcucaaagg

SEQ ID NO: 3192 - RNA, 23 nt, Artificial Sequence
  Description of Artificial Sequence: Synthetic oligonucleotide
caguccaaguguggcucaaagga

SEQ ID NO: 3193 - RNA, 23 nt, Artificial Sequence
  Description of Artificial Sequence: Synthetic oligonucleotide
aguccaaguguggcucaaaggau

SEQ ID NO: 3194 - RNA, 23 nt, Artificial Sequence
  Description of Artificial Sequence: Synthetic oligonucleotide
guccaaguguggcucaaaggaua

SEQ ID NO: 3195 - RNA, 23 nt, Artificial Sequence
  Description of Artificial Sequence: Synthetic oligonucleotide
uccaaguguggcucaaaggauaa

SEQ ID NO: 3196 - RNA, 23 nt, Artificial Sequence
  Description of Artificial Sequence: Synthetic oligonucleotide
ccaaguguggcucaaaggauaau

SEQ ID NO: 3197 - RNA, 23 nt, Artificial Sequence
  Description of Artificial Sequence: Synthetic oligonucleotide
caaguguggcucaaaggauaaua

SEQ ID NO: 3198 - RNA, 23 nt, Artificial Sequence
  Description of Artificial Sequence: Synthetic oligonucleotide
aaguguggcucaaaggauaauau

SEQ ID NO: 3199 - RNA, 23 nt, Artificial Sequence
  Description of Artificial Sequence: Synthetic oligonucleotide
aguguggcucaaaggauaauauc

SEQ ID NO: 3200 - RNA, 23 nt, Artificial Sequence
  Description of Artificial Sequence: Synthetic oligonucleotide
guguggcucaaaggauaauauca

SEQ ID NO: 3201 - RNA, 23 nt, Artificial Sequence
  Description of Artificial Sequence: Synthetic oligonucleotide
uguggcucaaaggauaauaucaa

SEQ ID NO: 3202 - RNA, 23 nt, Artificial Sequence
  Description of Artificial Sequence: Synthetic oligonucleotide
guggcucaaaggauaauaucaaa

SEQ ID NO: 3203 - RNA, 23 nt, Artificial Sequence
  Description of Artificial Sequence: Synthetic oligonucleotide
uggcucaaaggauaauaucaaac

SEQ ID NO: 3204 - RNA, 23 nt, Artificial Sequence
  Description of Artificial Sequence: Synthetic oligonucleotide
ggcucaaaggauaauaucaaaca

SEQ ID NO: 3205 - RNA, 23 nt, Artificial Sequence
  Description of Artificial Sequence: Synthetic oligonucleotide
gcucaaaggauaauaucaaacac

SEQ ID NO: 3206 - RNA, 23 nt, Artificial Sequence
  Description of Artificial Sequence: Synthetic oligonucleotide
cucaaaggauaauaucaaacacg

SEQ ID NO: 3207 - RNA, 23 nt, Artificial Sequence
  Description of Artificial Sequence: Synthetic oligonucleotide
ucaaaggauaauaucaaacacgu

SEQ ID NO: 3208 - RNA, 23 nt, Artificial Sequence
  Description of Artificial Sequence: Synthetic oligonucleotide
caaaggauaauaucaaacacguc

SEQ ID NO: 3209 - RNA, 23 nt, Artificial Sequence
  Description of Artificial Sequence: Synthetic oligonucleotide
aaaggauaauaucaaacacgucc

SEQ ID NO: 3210 - RNA, 23 nt, Artificial Sequence
  Description of Artificial Sequence: Synthetic oligonucleotide
aaggauaauaucaaacacguccc

SEQ ID NO: 3211 - RNA, 23 nt, Artificial Sequence
  Description of Artificial Sequence: Synthetic oligonucleotide
aggauaauaucaaacacgucccg

SEQ ID NO: 3212 - RNA, 23 nt, Artificial Sequence
  Description of Artificial Sequence: Synthetic oligonucleotide
ggauaauaucaaacacgucccgg

SEQ ID NO: 3213 - RNA, 23 nt, Artificial Sequence
  Description of Artificial Sequence: Synthetic oligonucleotide
gauaauaucaaacacgucccggg

SEQ ID NO: 3214 - RNA, 23 nt, Artificial Sequence
  Description of Artificial Sequence: Synthetic oligonucleotide
auaauaucaaacacgucccggga

SEQ ID NO: 3215 - RNA, 23 nt, Artificial Sequence
  Description of Artificial Sequence: Synthetic oligonucleotide
uaauaucaaacacgucccgggag

SEQ ID NO: 3216 - RNA, 23 nt, Artificial Sequence
  Description of Artificial Sequence: Synthetic oligonucleotide
aauaucaaacacgucccgggagg

SEQ ID NO: 3217 - RNA, 23 nt, Artificial Sequence
  Description of Artificial Sequence: Synthetic oligonucleotide
auaucaaacacgucccgggaggc

SEQ ID NO: 3218 - RNA, 23 nt, Artificial Sequence
  Description of Artificial Sequence: Synthetic oligonucleotide
uaucaaacacgucccgggaggcg

SEQ ID NO: 3219 - RNA, 23 nt, Artificial Sequence
  Description of Artificial Sequence: Synthetic oligonucleotide
aucaaacacgucccgggaggcgg

SEQ ID NO: 3220 - RNA, 23 nt, Artificial Sequence
  Description of Artificial Sequence: Synthetic oligonucleotide
ucaaacacgucccgggaggcggc

SEQ ID NO: 3221 - RNA, 23 nt, Artificial Sequence
  Description of Artificial Sequence: Synthetic oligonucleotide
caaacacgucccgggaggcggca

SEQ ID NO: 3222 - RNA, 23 nt, Artificial Sequence
  Description of Artificial Sequence: Synthetic oligonucleotide
aacacgucccgggaggcggcagu

SEQ ID NO: 3223 - RNA, 21 nt, Artificial Sequence
  Description of Artificial Sequence: Synthetic oligonucleotide
uggaaauaaaguuauuacuca

SEQ ID NO: 3224 - RNA, 21 nt, Artificial Sequence
  Description of Artificial Sequence: Synthetic oligonucleotide
agugugcaaauagucuacaaa

SEQ ID NO: 3225 - RNA, 21 nt, Artificial Sequence
  Description of Artificial Sequence: Synthetic oligonucleotide
ugcaaauagucuacaaaccaa

SEQ ID NO: 3226 - RNA, 21 nt, Artificial Sequence
  Description of Artificial Sequence: Synthetic oligonucleotide
aaauagucuacaaaccaguua

SEQ ID NO: 3227 - RNA, 21 nt, Artificial Sequence
  Description of Artificial Sequence: Synthetic oligonucleotide
aauagucuacaaaccaguuga

SEQ ID NO: 3228 - RNA, 21 nt, Artificial Sequence
  Description of Artificial Sequence: Synthetic oligonucleotide
auagucuacaaaccaguugaa

SEQ ID NO: 3229 - RNA, 21 nt, Artificial Sequence
  Description of Artificial Sequence: Synthetic oligonucleotide
gucuacaaaccaguugaccua

SEQ ID NO: 3230 - RNA, 21 nt, Artificial Sequence
  Description of Artificial Sequence: Synthetic oligonucleotide
uacaaaccaguugaccugaga

SEQ ID NO: 3231 - RNA, 21 nt, Artificial Sequence
  Description of Artificial Sequence: Synthetic oligonucleotide
acaaaccaguugaccugagca

SEQ ID NO: 3232 - RNA, 21 nt, Artificial Sequence
  Description of Artificial Sequence: Synthetic oligonucleotide
aggcaacauccaucauaaaca

SEQ ID NO: 3233 - RNA, 21 nt, Artificial Sequence
  Description of Artificial Sequence: Synthetic oligonucleotide
ggcaacauccaucauaaacca

SEQ ID NO: 3234 - RNA, 21 nt, Artificial Sequence
  Description of Artificial Sequence: Synthetic oligonucleotide
aacauccaucauaaaccagga

SEQ ID NO: 3235 - RNA, 21 nt, Artificial Sequence
  Description of Artificial Sequence: Synthetic oligonucleotide
auccaucauaaaccaggagga

SEQ ID NO: 3236 - RNA, 21 nt, Artificial Sequence
  Description of Artificial Sequence: Synthetic oligonucleotide
uccaucauaaaccaggaggua

SEQ ID NO: 3237 - RNA, 21 nt, Artificial Sequence
  Description of Artificial Sequence: Synthetic oligonucleotide
ccaucauaaaccaggagguga

SEQ ID NO: 3238 - RNA, 21 nt, Artificial Sequence
  Description of Artificial Sequence: Synthetic oligonucleotide
aucugagaagcuugacuucaa

SEQ ID NO: 3239 - RNA, 21 nt, Artificial Sequence
  Description of Artificial Sequence: Synthetic oligonucleotide
cgcauggucaguaaaagcaaa

SEQ ID NO: 3240 - RNA, 21 nt, Artificial Sequence
  Description of Artificial Sequence: Synthetic oligonucleotide
gugacccaagcucgcauggua

SEQ ID NO: 3241 - RNA, 21 nt, Artificial Sequence
  Description of Artificial Sequence: Synthetic oligonucleotide
ugacccaagcucgcaugguca

SEQ ID NO: 3242 - RNA, 21 nt, Artificial Sequence
  Description of Artificial Sequence: Synthetic oligonucleotide
cccaagcucgcauggucagua

SEQ ID NO: 3243 - RNA, 21 nt, Artificial Sequence
  Description of Artificial Sequence: Synthetic oligonucleotide
ccaagcucgcauggucaguaa

SEQ ID NO: 3244 - RNA, 21 nt, Artificial Sequence
  Description of Artificial Sequence: Synthetic oligonucleotide
caagcucgcauggucaguaaa

SEQ ID NO: 3245 - RNA, 21 nt, Artificial Sequence
  Description of Artificial Sequence: Synthetic oligonucleotide
gcucgcauggucaguaaaaga

SEQ ID NO: 3246 - RNA, 21 nt, Artificial Sequence
  Description of Artificial Sequence: Synthetic oligonucleotide
cauggucaguaaaagcaaaga

SEQ ID NO: 3247 - RNA, 21 nt, Artificial Sequence
  Description of Artificial Sequence: Synthetic oligonucleotide
auggucaguaaaagcaaagaa

SEQ ID NO: 3248 - RNA, 21 nt, Artificial Sequence
  Description of Artificial Sequence: Synthetic oligonucleotide
uggucaguaaaagcaaagaca

SEQ ID NO: 3249 - RNA, 21 nt, Artificial Sequence
  Description of Artificial Sequence: Synthetic oligonucleotide
caguaaaagcaaagacgggaa

SEQ ID NO: 3250 - RNA, 21 nt, Artificial Sequence
  Description of Artificial Sequence: Synthetic oligonucleotide
aguaaaagcaaagacgggaca

SEQ ID NO: 3251 - RNA, 21 nt, Artificial Sequence
  Description of Artificial Sequence: Synthetic oligonucleotide
caucauaaaccaggaggugga

SEQ ID NO: 3252 - RNA, 23 nt, Artificial Sequence
  Description of Artificial Sequence: Synthetic oligonucleotide
ugaguaauaacuuuauuuccaaa

SEQ ID NO: 3253 - RNA, 23 nt, Artificial Sequence
  Description of Artificial Sequence: Synthetic oligonucleotide
uuuguagacuauuugcacacugc

SEQ ID NO: 3254 - DNA, 23 bp, Artificial Sequence
  Description of Artificial Sequence: Synthetic oligonucleotide
  Description of Combined DNA/RNA Molecule: Synthetic oligonucleotide
uuggtutguagacuauuugcaca

SEQ ID NO: 3255 - DNA, 23 bp, Artificial Sequence
  Description of Artificial Sequence: Synthetic oligonucleotide
  Description of Combined DNA/RNA Molecule: Synthetic oligonucleotide
uaactgguuuguagacuauuugc

SEQ ID NO: 3256 - RNA, 23 nt, Artificial Sequence
  Description of Artificial Sequence: Synthetic oligonucleotide
ucaacugguuuguagacuauuug

SEQ ID NO: 3257 - DNA, 23 bp, Artificial Sequence
  Description of Artificial Sequence: Synthetic oligonucleotide
  Description of Combined DNA/RNA Molecule: Synthetic oligonucleotide
uucaactgguuuguagacuauuu

SEQ ID NO: 3258 - DNA, 23 bp, Artificial Sequence
  Description of Artificial Sequence: Synthetic oligonucleotide
  Description of Combined DNA/RNA Molecule: Synthetic oligonucleotide
uaggtcaacugguuuguagacua

SEQ ID NO: 3259 - RNA, 23 nt, Artificial Sequence
  Description of Artificial Sequence: Synthetic oligonucleotide
ucucaggucaacugguuuguaga

SEQ ID NO: 3260 - RNA, 23 nt, Artificial Sequence
  Description of Artificial Sequence: Synthetic oligonucleotide
ugcucaggucaacugguuuguag

SEQ ID NO: 3261 - DNA, 23 bp, Artificial Sequence
  Description of Artificial Sequence: Synthetic oligonucleotide
  Description of Combined DNA/RNA Molecule: Synthetic oligonucleotide
uguutatgauggauguugccuaa

SEQ ID NO: 3262 - DNA, 23 bp, Artificial Sequence
  Description of Artificial Sequence: Synthetic oligonucleotide
  Description of Combined DNA/RNA Molecule: Synthetic oligonucleotide
uggutuaugauggauguugccua

SEQ ID NO: 3263 - DNA, 23 bp, Artificial Sequence
  Description of Artificial Sequence: Synthetic oligonucleotide
  Description of Combined DNA/RNA Molecule: Synthetic oligonucleotide
uccuggtuuaugauggauguugc

SEQ ID NO: 3264 - DNA, 23 bp, Artificial Sequence
  Description of Artificial Sequence: Synthetic oligonucleotide
  Description of Combined DNA/RNA Molecule: Synthetic oligonucleotide
uccucctgguutaugauggaugu

SEQ ID NO: 3265 - DNA, 23 bp, Artificial Sequence
  Description of Artificial Sequence: Synthetic oligonucleotide
  Description of Combined DNA/RNA Molecule: Synthetic oligonucleotide
uacctccugguuuaugauggaug

SEQ ID NO: 3266 - DNA, 23 bp, Artificial Sequence
  Description of Artificial Sequence: Synthetic oligonucleotide
  Description of Combined DNA/RNA Molecule: Synthetic oligonucleotide
ucaccuccuggtuuaugauggau

SEQ ID NO: 3267 - DNA, 23 bp, Artificial Sequence
  Description of Artificial Sequence: Synthetic oligonucleotide
  Description of Combined DNA/RNA Molecule: Synthetic oligonucleotide
uugaagtcaagcuucucagauuu

SEQ ID NO: 3268 - RNA, 23 nt, Artificial Sequence
  Description of Artificial Sequence: Synthetic oligonucleotide
uuugcuuuuacugaccaugcgag

SEQ ID NO: 3269 - RNA, 23 nt, Artificial Sequence
  Description of Artificial Sequence: Synthetic oligonucleotide
uaccaugcgagcuugggucacgu

SEQ ID NO: 3270 - DNA, 23 bp, Artificial Sequence
  Description of Artificial Sequence: Synthetic oligonucleotide
  Description of Combined DNA/RNA Molecule: Synthetic oligonucleotide
ugaccatgcgagcuugggucacg

SEQ ID NO: 3271 - RNA, 23 nt, Artificial Sequence
  Description of Artificial Sequence: Synthetic oligonucleotide
uacugaccaugcgagcuuggguc

SEQ ID NO: 3272 - DNA, 23 bp, Artificial Sequence
  Description of Artificial Sequence: Synthetic oligonucleotide
  Description of Combined DNA/RNA Molecule: Synthetic oligonucleotide
uuactgaccaugcgagcuugggu

SEQ ID NO: 3273 - RNA, 23 nt, Artificial Sequence
  Description of Artificial Sequence: Synthetic oligonucleotide
uuuacugaccaugcgagcuuggg

SEQ ID NO: 3274 - DNA, 23 bp, Artificial Sequence
  Description of Artificial Sequence: Synthetic oligonucleotide
  Description of Combined DNA/RNA Molecule: Synthetic oligonucleotide
ucuutuacugaccaugcgagcuu

SEQ ID NO: 3275 - DNA, 23 bp, Artificial Sequence
  Description of Artificial Sequence: Synthetic oligonucleotide
  Description of Combined DNA/RNA Molecule: Synthetic oligonucleotide
ucuutgcuuuuacugaccaugcg

SEQ ID NO: 3276 - DNA, 23 bp, Artificial Sequence
  Description of Artificial Sequence: Synthetic oligonucleotide
  Description of Combined DNA/RNA Molecule: Synthetic oligonucleotide
uucutugcuuuuacugaccaugc

SEQ ID NO: 3277 - DNA, 23 bp, Artificial Sequence
  Description of Artificial Sequence: Synthetic oligonucleotide
  Description of Combined DNA/RNA Molecule: Synthetic oligonucleotide
uguctutgcuuuuacugaccaug

SEQ ID NO: 3278 - DNA, 23 bp, Artificial Sequence
  Description of Artificial Sequence: Synthetic oligonucleotide
  Description of Combined DNA/RNA Molecule: Synthetic oligonucleotide
utcccgtcuuugcuuuuacugac

SEQ ID NO: 3279 - RNA, 23 nt, Artificial Sequence
  Description of Artificial Sequence: Synthetic oligonucleotide
ugucccgucuuugcuuuuacuga

SEQ ID NO: 3280 - DNA, 23 bp, Artificial Sequence
  Description of Artificial Sequence: Synthetic oligonucleotide
  Description of Combined DNA/RNA Molecule: Synthetic oligonucleotide
uccacctccugguuuaugaugga

SEQ ID NO: 3281 - RNA, 21 nt, Artificial Sequence
  Description of Artificial Sequence: Synthetic oligonucleotide
uggaaauaaaguuauuacuca

SEQ ID NO: 3282 - RNA, 21 nt, Artificial Sequence
  Description of Artificial Sequence: Synthetic oligonucleotide
agugugcaaauagucuacaaa

SEQ ID NO: 3283 - RNA, 21 nt, Artificial Sequence
  Description of Artificial Sequence: Synthetic oligonucleotide
ugcaaauagucuacaaaccaa

SEQ ID NO: 3284 - RNA, 21 nt, Artificial Sequence
  Description of Artificial Sequence: Synthetic oligonucleotide
aaauagucuacaaaccaguua

SEQ ID NO: 3285 - RNA, 21 nt, Artificial Sequence
  Description of Artificial Sequence: Synthetic oligonucleotide
aauagucuacaaaccaguuga

SEQ ID NO: 3286 - RNA, 21 nt, Artificial Sequence
  Description of Artificial Sequence: Synthetic oligonucleotide
auagucuacaaaccaguugaa

SEQ ID NO: 3287 - RNA, 21 nt, Artificial Sequence
  Description of Artificial Sequence: Synthetic oligonucleotide
gucuacaaaccaguugaccua

SEQ ID NO: 3288 - RNA, 21 nt, Artificial Sequence
  Description of Artificial Sequence: Synthetic oligonucleotide
uacaaaccaguugaccugaga

SEQ ID NO: 3289 - RNA, 21 nt, Artificial Sequence
  Description of Artificial Sequence: Synthetic oligonucleotide
acaaaccaguugaccugagca

SEQ ID NO: 3290 - RNA, 21 nt, Artificial Sequence
  Description of Artificial Sequence: Synthetic oligonucleotide
aggcaacauccaucauaaaca

SEQ ID NO: 3291 - RNA, 21 nt, Artificial Sequence
  Description of Artificial Sequence: Synthetic oligonucleotide
ggcaacauccaucauaaacca

SEQ ID NO: 3292 - RNA, 21 nt, Artificial Sequence
  Description of Artificial Sequence: Synthetic oligonucleotide
aacauccaucauaaaccagga

SEQ ID NO: 3293 - RNA, 21 nt, Artificial Sequence
  Description of Artificial Sequence: Synthetic oligonucleotide
auccaucauaaaccaggagga

SEQ ID NO: 3294 - RNA, 21 nt, Artificial Sequence
  Description of Artificial Sequence: Synthetic oligonucleotide
uccaucauaaaccaggaggua

SEQ ID NO: 3295 - RNA, 21 nt, Artificial Sequence
  Description of Artificial Sequence: Synthetic oligonucleotide
ccaucauaaaccaggagguga

SEQ ID NO: 3296 - RNA, 21 nt, Artificial Sequence
  Description of Artificial Sequence: Synthetic oligonucleotide
aucugagaagcuugacuucaa

SEQ ID NO: 3297 - RNA, 21 nt, Artificial Sequence
  Description of Artificial Sequence: Synthetic oligonucleotide
cgcauggucaguaaaagcaaa

SEQ ID NO: 3298 - RNA, 21 nt, Artificial Sequence
  Description of Artificial Sequence: Synthetic oligonucleotide
gugacccaagcucgcauggua

SEQ ID NO: 3299 - RNA, 21 nt, Artificial Sequence
  Description of Artificial Sequence: Synthetic oligonucleotide
ugacccaagcucgcaugguca

SEQ ID NO: 3300 - RNA, 21 nt, Artificial Sequence
  Description of Artificial Sequence: Synthetic oligonucleotide
cccaagcucgcauggucagua

SEQ ID NO: 3301 - RNA, 21 nt, Artificial Sequence
  Description of Artificial Sequence: Synthetic oligonucleotide
ccaagcucgcauggucaguaa

SEQ ID NO: 3302 - RNA, 21 nt, Artificial Sequence
  Description of Artificial Sequence: Synthetic oligonucleotide
caagcucgcauggucaguaaa

SEQ ID NO: 3303 - RNA, 21 nt, Artificial Sequence
  Description of Artificial Sequence: Synthetic oligonucleotide
gcucgcauggucaguaaaaga

SEQ ID NO: 3304 - RNA, 21 nt, Artificial Sequence
  Description of Artificial Sequence: Synthetic oligonucleotide
cauggucaguaaaagcaaaga

SEQ ID NO: 3305 - RNA, 21 nt, Artificial Sequence
  Description of Artificial Sequence: Synthetic oligonucleotide
auggucaguaaaagcaaagaa

SEQ ID NO: 3306 - RNA, 21 nt, Artificial Sequence
  Description of Artificial Sequence: Synthetic oligonucleotide
uggucaguaaaagcaaagaca

SEQ ID NO: 3307 - RNA, 21 nt, Artificial Sequence
  Description of Artificial Sequence: Synthetic oligonucleotide
caguaaaagcaaagacgggaa

SEQ ID NO: 3308 - RNA, 21 nt, Artificial Sequence
  Description of Artificial Sequence: Synthetic oligonucleotide
aguaaaagcaaagacgggaca

SEQ ID NO: 3309 - RNA, 21 nt, Artificial Sequence
  Description of Artificial Sequence: Synthetic oligonucleotide
caucauaaaccaggaggugga

SEQ ID NO: 3310 - RNA, 23 nt, Artificial Sequence
  Description of Artificial Sequence: Synthetic oligonucleotide
ugaguaauaacuuuauuuccaaa

SEQ ID NO: 3311 - RNA, 23 nt, Artificial Sequence
  Description of Artificial Sequence: Synthetic oligonucleotide
uuuguagacuauuugcacacugc

SEQ ID NO: 3312 - DNA, 23 bp, Artificial Sequence
  Description of Artificial Sequence: Synthetic oligonucleotide
  Description of Combined DNA/RNA Molecule: Synthetic oligonucleotide
uuggtutguagacuauuugcaca

SEQ ID NO: 3313 - DNA, 23 bp, Artificial Sequence
  Description of Artificial Sequence: Synthetic oligonucleotide
  Description of Combined DNA/RNA Molecule: Synthetic oligonucleotide
uaactgguuuguagacuauuugc

SEQ ID NO: 3314 - DNA, 23 bp, Artificial Sequence
  Description of Artificial Sequence: Synthetic oligonucleotide
  Description of Combined DNA/RNA Molecule: Synthetic oligonucleotide
ucaacugguuuguagacuauuug

SEQ ID NO: 3315 - DNA, 23 bp, Artificial Sequence
  Description of Artificial Sequence: Synthetic oligonucleotide
  Description of Combined DNA/RNA Molecule: Synthetic oligonucleotide
uucaactgguuuguagacuauuu

SEQ ID NO: 3316 - DNA, 23 bp, Artificial Sequence
  Description of Artificial Sequence: Synthetic oligonucleotide
  Description of Combined DNA/RNA Molecule: Synthetic oligonucleotide
uaggtcaacugguuuguagacua

SEQ ID NO: 3317 - DNA, 23 bp, Artificial Sequence
  Description of Artificial Sequence: Synthetic oligonucleotide
  Description of Combined DNA/RNA Molecule: Synthetic oligonucleotide
ucucaggucaacugguuuguaga

SEQ ID NO: 3318 - DNA, 23 bp, Artificial Sequence
  Description of Artificial Sequence: Synthetic oligonucleotide
  Description of Combined DNA/RNA Molecule: Synthetic oligonucleotide
ugcucaggucaacugguuuguag

SEQ ID NO: 3319 - DNA, 23 bp, Artificial Sequence
  Description of Artificial Sequence: Synthetic oligonucleotide
  Description of Combined DNA/RNA Molecule: Synthetic oligonucleotide
uguutatgauggauguugccuaa

SEQ ID NO: 3320 - DNA, 23 bp, Artificial Sequence
  Description of Artificial Sequence: Synthetic oligonucleotide
  Description of Combined DNA/RNA Molecule: Synthetic oligonucleotide
uggutuaugauggauguugccua

SEQ ID NO: 3321 - DNA, 23 bp, Artificial Sequence
  Description of Artificial Sequence: Synthetic oligonucleotide
  Description of Combined DNA/RNA Molecule: Synthetic oligonucleotide
uccuggtuuaugauggauguugc

SEQ ID NO: 3322 - DNA, 23 bp, Artificial Sequence
  Description of Artificial Sequence: Synthetic oligonucleotide
  Description of Combined DNA/RNA Molecule: Synthetic oligonucleotide
uccucctgguutaugauggaugu

SEQ ID NO: 3323 - DNA, 23 bp, Artificial Sequence
  Description of Artificial Sequence: Synthetic oligonucleotide
  Description of Combined DNA/RNA Molecule: Synthetic oligonucleotide
uacctccugguuuaugauggaug

SEQ ID NO: 3324 - DNA, 23 bp, Artificial Sequence
  Description of Artificial Sequence: Synthetic oligonucleotide
  Description of Combined DNA/RNA Molecule: Synthetic oligonucleotide
ucaccuccuggtuuaugauggau

SEQ ID NO: 3325 - DNA, 23 bp, Artificial Sequence
  Description of Artificial Sequence: Synthetic oligonucleotide
  Description of Combined DNA/RNA Molecule: Synthetic oligonucleotide
uugaagtcaagcuucucagauuu

SEQ ID NO: 3326 - RNA, 23 nt, Artificial Sequence
  Description of Artificial Sequence: Synthetic oligonucleotide
uuugcuuuuacugaccaugcgag

SEQ ID NO: 3327 - DNA, 23 bp, Artificial Sequence
  Description of Artificial Sequence: Synthetic oligonucleotide
  Description of Combined DNA/RNA Molecule: Synthetic oligonucleotide
uaccaugcgagcuugggucacgu

SEQ ID NO: 3328 - DNA, 23 bp, Artificial Sequence
  Description of Artificial Sequence: Synthetic oligonucleotide
  Description of Combined DNA/RNA Molecule: Synthetic oligonucleotide
ugaccatgcgagcuugggucacg

SEQ ID NO: 3329 - DNA, 23 bp, Artificial Sequence
  Description of Artificial Sequence: Synthetic oligonucleotide
  Description of Combined DNA/RNA Molecule: Synthetic oligonucleotide
uacugaccaugcgagcuuggguc

SEQ ID NO: 3330 - DNA, 23 bp, Artificial Sequence
  Description of Artificial Sequence: Synthetic oligonucleotide
  Description of Combined DNA/RNA Molecule: Synthetic oligonucleotide
uuactgaccaugcgagcuugggu

SEQ ID NO: 3331 - DNA, 23 bp, Artificial Sequence
  Description of Artificial Sequence: Synthetic oligonucleotide
  Description of Combined DNA/RNA Molecule: Synthetic oligonucleotide
uuuacugaccaugcgagcuuggg

SEQ ID NO: 3332 - DNA, 23 bp, Artificial Sequence
  Description of Artificial Sequence: Synthetic oligonucleotide
  Description of Combined DNA/RNA Molecule: Synthetic oligonucleotide
ucuutuacugaccaugcgagcuu

SEQ ID NO: 3333 - DNA, 23 bp, Artificial Sequence
  Description of Artificial Sequence: Synthetic oligonucleotide
  Description of Combined DNA/RNA Molecule: Synthetic oligonucleotide
ucuutgcuuuuacugaccaugcg

SEQ ID NO: 3334 - DNA, 23 bp, Artificial Sequence
  Description of Artificial Sequence: Synthetic oligonucleotide
  Description of Combined DNA/RNA Molecule: Synthetic oligonucleotide
uucutugcuuuuacugaccaugc

SEQ ID NO: 3335 - DNA, 23 bp, Artificial Sequence
  Description of Artificial Sequence: Synthetic oligonucleotide
  Description of Combined DNA/RNA Molecule: Synthetic oligonucleotide
uguctutgcuuuuacugaccaug

SEQ ID NO: 3336 - DNA, 23 bp, Artificial Sequence
  Description of Artificial Sequence: Synthetic oligonucleotide
  Description of Combined DNA/RNA Molecule: Synthetic oligonucleotide
utcccgtcuuugcuuuuacugac

SEQ ID NO: 3337 - DNA, 23 bp, Artificial Sequence
  Description of Artificial Sequence: Synthetic oligonucleotide
  Description of Combined DNA/RNA Molecule: Synthetic oligonucleotide
ugucccgucuuugcuuuuacuga

SEQ ID NO: 3338 - DNA, 23 bp, Artificial Sequence
  Description of Artificial Sequence: Synthetic oligonucleotide
  Description of Combined DNA/RNA Molecule: Synthetic oligonucleotide
uccacctccugguuuaugaugga

SEQ ID NO: 3339 - RNA, 23 nt, Artificial Sequence
  Description of Artificial Sequence: Synthetic oligonucleotide
uuuggaaauaaaguuauuacucu

SEQ ID NO: 3340 - RNA, 23 nt, Artificial Sequence
  Description of Artificial Sequence: Synthetic oligonucleotide
gcagugugcaaauagucuacaag

SEQ ID NO: 3341 - RNA, 23 nt, Artificial Sequence
  Description of Artificial Sequence: Synthetic oligonucleotide
ugugcaaauagucuacaaaccag

SEQ ID NO: 3342 - RNA, 23 nt, Artificial Sequence
  Description of Artificial Sequence: Synthetic oligonucleotide
gcaaauagucuacaaaccaguug

SEQ ID NO: 3343 - RNA, 23 nt, Artificial Sequence
  Description of Artificial Sequence: Synthetic oligonucleotide
caaauagucuacaaaccaguuga

SEQ ID NO: 3344 - RNA, 23 nt, Artificial Sequence
  Description of Artificial Sequence: Synthetic oligonucleotide
aaauagucuacaaaccaguugac

SEQ ID NO: 3345 - RNA, 23 nt, Artificial Sequence
  Description of Artificial Sequence: Synthetic oligonucleotide
uagucuacaaaccaguugaccug

SEQ ID NO: 3346 - RNA, 23 nt, Artificial Sequence
  Description of Artificial Sequence: Synthetic oligonucleotide
ucuacaaaccaguugaccugagc

SEQ ID NO: 3347 - RNA, 23 nt, Artificial Sequence
  Description of Artificial Sequence: Synthetic oligonucleotide
cuacaaaccaguugaccugagca

SEQ ID NO: 3348 - RNA, 23 nt, Artificial Sequence
  Description of Artificial Sequence: Synthetic oligonucleotide
uuaggcaacauccaucauaaacc

SEQ ID NO: 3349 - RNA, 23 nt, Artificial Sequence
  Description of Artificial Sequence: Synthetic oligonucleotide
uaggcaacauccaucauaaacca

SEQ ID NO: 3350 - RNA, 23 nt, Artificial Sequence
  Description of Artificial Sequence: Synthetic oligonucleotide
gcaacauccaucauaaaccagga

SEQ ID NO: 3351 - RNA, 23 nt, Artificial Sequence
  Description of Artificial Sequence: Synthetic oligonucleotide
acauccaucauaaaccaggaggu

SEQ ID NO: 3352 - RNA, 23 nt, Artificial Sequence
  Description of Artificial Sequence: Synthetic oligonucleotide
cauccaucauaaaccaggaggug

SEQ ID NO: 3353 - RNA, 23 nt, Artificial Sequence
  Description of Artificial Sequence: Synthetic oligonucleotide
auccaucauaaaccaggaggugg

SEQ ID NO: 3354 - RNA, 23 nt, Artificial Sequence
  Description of Artificial Sequence: Synthetic oligonucleotide
aaaucugagaagcuugacuucaa

SEQ ID NO: 3355 - RNA, 23 nt, Artificial Sequence
  Description of Artificial Sequence: Synthetic oligonucleotide
cucgcauggucaguaaaagcaaa

SEQ ID NO: 3356 - RNA, 23 nt, Artificial Sequence
  Description of Artificial Sequence: Synthetic oligonucleotide
acgugacccaagcucgcaugguc

SEQ ID NO: 3357 - RNA, 23 nt, Artificial Sequence
  Description of Artificial Sequence: Synthetic oligonucleotide
cgugacccaagcucgcaugguca

SEQ ID NO: 3358 - RNA, 23 nt, Artificial Sequence
  Description of Artificial Sequence: Synthetic oligonucleotide
gacccaagcucgcauggucagua

SEQ ID NO: 3359 - RNA, 23 nt, Artificial Sequence
  Description of Artificial Sequence: Synthetic oligonucleotide
acccaagcucgcauggucaguaa

SEQ ID NO: 3360 - RNA, 23 nt, Artificial Sequence
  Description of Artificial Sequence: Synthetic oligonucleotide
cccaagcucgcauggucaguaaa

SEQ ID NO: 3361 - RNA, 23 nt, Artificial Sequence
  Description of Artificial Sequence: Synthetic oligonucleotide
aagcucgcauggucaguaaaagc

SEQ ID NO: 3362 - RNA, 23 nt, Artificial Sequence
  Description of Artificial Sequence: Synthetic oligonucleotide
cgcauggucaguaaaagcaaaga

SEQ ID NO: 3363 - RNA, 23 nt, Artificial Sequence
  Description of Artificial Sequence: Synthetic oligonucleotide
gcauggucaguaaaagcaaagac

SEQ ID NO: 3364 - RNA, 23 nt, Artificial Sequence
  Description of Artificial Sequence: Synthetic oligonucleotide
cauggucaguaaaagcaaagacg

SEQ ID NO: 3365 - RNA, 23 nt, Artificial Sequence
  Description of Artificial Sequence: Synthetic oligonucleotide
gucaguaaaagcaaagacgggac

SEQ ID NO: 3366 - RNA, 23 nt, Artificial Sequence
  Description of Artificial Sequence: Synthetic oligonucleotide
ucaguaaaagcaaagacgggacu

SEQ ID NO: 3367 - RNA, 23 nt, Artificial Sequence
  Description of Artificial Sequence: Synthetic oligonucleotide
uccaucauaaaccaggagguggc

SEQ ID NO: 3368 - RNA, 21 nt, Artificial Sequence
  Description of Artificial Sequence: Synthetic oligonucleotide
acgugacccaagcucgcauga

SEQ ID NO: 3369 - RNA, 21 nt, Artificial Sequence
  Description of Artificial Sequence: Synthetic oligonucleotide
cgugacccaagcucgcaugga

SEQ ID NO: 3370 - RNA, 21 nt, Artificial Sequence
  Description of Artificial Sequence: Synthetic oligonucleotide
gugacccaagcucgcauggua

SEQ ID NO: 3371 - RNA, 21 nt, Artificial Sequence
  Description of Artificial Sequence: Synthetic oligonucleotide
ugacccaagcucgcaugguca

SEQ ID NO: 3372 - RNA, 21 nt, Artificial Sequence
  Description of Artificial Sequence: Synthetic oligonucleotide
gacccaagcucgcauggucaa

SEQ ID NO: 3373 - RNA, 21 nt, Artificial Sequence
  Description of Artificial Sequence: Synthetic oligonucleotide
acccaagcucgcauggucaga

SEQ ID NO: 3374 - RNA, 21 nt, Artificial Sequence
  Description of Artificial Sequence: Synthetic oligonucleotide
cccaagcucgcauggucagua

SEQ ID NO: 3375 - RNA, 21 nt, Artificial Sequence
  Description of Artificial Sequence: Synthetic oligonucleotide
ccaagcucgcauggucaguaa

SEQ ID NO: 3376 - RNA, 21 nt, Artificial Sequence
  Description of Artificial Sequence: Synthetic oligonucleotide
caagcucgcauggucaguaaa

SEQ ID NO: 3377 - RNA, 21 nt, Artificial Sequence
  Description of Artificial Sequence: Synthetic oligonucleotide
agcucgcauggucaguaaaaa

SEQ ID NO: 3378 - RNA, 21 nt, Artificial Sequence
  Description of Artificial Sequence: Synthetic oligonucleotide
gcucgcauggucaguaaaaga

SEQ ID NO: 3379 - RNA, 21 nt, Artificial Sequence
  Description of Artificial Sequence: Synthetic oligonucleotide
cucgcauggucaguaaaagca

SEQ ID NO: 3380 - RNA, 21 nt, Artificial Sequence
  Description of Artificial Sequence: Synthetic oligonucleotide
ucgcauggucaguaaaagcaa

SEQ ID NO: 3381 - RNA, 21 nt, Artificial Sequence
  Description of Artificial Sequence: Synthetic oligonucleotide
cgcauggucaguaaaagcaaa

SEQ ID NO: 3382 - RNA, 21 nt, Artificial Sequence
  Description of Artificial Sequence: Synthetic oligonucleotide
gcauggucaguaaaagcaaaa

SEQ ID NO: 3383 - RNA, 21 nt, Artificial Sequence
  Description of Artificial Sequence: Synthetic oligonucleotide
cauggucaguaaaagcaaaga

SEQ ID NO: 3384 - RNA, 21 nt, Artificial Sequence
  Description of Artificial Sequence: Synthetic oligonucleotide
auggucaguaaaagcaaagaa

SEQ ID NO: 3385 - RNA, 21 nt, Artificial Sequence
  Description of Artificial Sequence: Synthetic oligonucleotide
uggucaguaaaagcaaagaca

SEQ ID NO: 3386 - RNA, 21 nt, Artificial Sequence
  Description of Artificial Sequence: Synthetic oligonucleotide
ggucaguaaaagcaaagacga

SEQ ID NO: 3387 - RNA, 21 nt, Artificial Sequence
  Description of Artificial Sequence: Synthetic oligonucleotide
gucaguaaaagcaaagacgga

SEQ ID NO: 3388 - RNA, 21 nt, Artificial Sequence
  Description of Artificial Sequence: Synthetic oligonucleotide
ucaguaaaagcaaagacggga

SEQ ID NO: 3389 - RNA, 21 nt, Artificial Sequence
  Description of Artificial Sequence: Synthetic oligonucleotide
caguaaaagcaaagacgggaa

SEQ ID NO: 3390 - RNA, 21 nt, Artificial Sequence
  Description of Artificial Sequence: Synthetic oligonucleotide
aguaaaagcaaagacgggaca

SEQ ID NO: 3391 - RNA, 21 nt, Artificial Sequence
  Description of Artificial Sequence: Synthetic oligonucleotide
agugugcaaauagucuacaaa

SEQ ID NO: 3392 - RNA, 21 nt, Artificial Sequence
  Description of Artificial Sequence: Synthetic oligonucleotide
gugcaaauagucuacaaacca

SEQ ID NO: 3393 - RNA, 21 nt, Artificial Sequence
  Description of Artificial Sequence: Synthetic oligonucleotide
ugcaaauagucuacaaaccaa

SEQ ID NO: 3394 - RNA, 21 nt, Artificial Sequence
  Description of Artificial Sequence: Synthetic oligonucleotide
gcaaauagucuacaaaccaga

SEQ ID NO: 3395 - RNA, 21 nt, Artificial Sequence
  Description of Artificial Sequence: Synthetic oligonucleotide
aauagucuacaaaccaguuga

SEQ ID NO: 3396 - RNA, 21 nt, Artificial Sequence
  Description of Artificial Sequence: Synthetic oligonucleotide
auagucuacaaaccaguugaa

SEQ ID NO: 3397 - RNA, 21 nt, Artificial Sequence
  Description of Artificial Sequence: Synthetic oligonucleotide
uagucuacaaaccaguugaca

SEQ ID NO: 3398 - RNA, 21 nt, Artificial Sequence
  Description of Artificial Sequence: Synthetic oligonucleotide
agucuacaaaccaguugacca

SEQ ID NO: 3399 - RNA, 21 nt, Artificial Sequence
  Description of Artificial Sequence: Synthetic oligonucleotide
gucuacaaaccaguugaccua

SEQ ID NO: 3400 - RNA, 21 nt, Artificial Sequence
  Description of Artificial Sequence: Synthetic oligonucleotide
cuacaaaccaguugaccugaa

SEQ ID NO: 3401 - RNA, 21 nt, Artificial Sequence
  Description of Artificial Sequence: Synthetic oligonucleotide
uacaaaccaguugaccugaga

SEQ ID NO: 3402 - RNA, 21 nt, Artificial Sequence
  Description of Artificial Sequence: Synthetic oligonucleotide
acaaaccaguugaccugagca

SEQ ID NO: 3403 - RNA, 21 nt, Artificial Sequence
  Description of Artificial Sequence: Synthetic oligonucleotide
aaaccaguugaccugagcaaa

SEQ ID NO: 3404 - RNA, 21 nt, Artificial Sequence
  Description of Artificial Sequence: Synthetic oligonucleotide
aaccaguugaccugagcaaga

SEQ ID NO: 3405 - RNA, 21 nt, Artificial Sequence
  Description of Artificial Sequence: Synthetic oligonucleotide
aggcaacauccaucauaaaca

SEQ ID NO: 3406 - RNA, 21 nt, Artificial Sequence
  Description of Artificial Sequence: Synthetic oligonucleotide
ggcaacauccaucauaaacca

SEQ ID NO: 3407 - RNA, 21 nt, Artificial Sequence
  Description of Artificial Sequence: Synthetic oligonucleotide
aacauccaucauaaaccagga

SEQ ID NO: 3408 - RNA, 21 nt, Artificial Sequence
  Description of Artificial Sequence: Synthetic oligonucleotide
acauccaucauaaaccaggaa

SEQ ID NO: 3409 - RNA, 21 nt, Artificial Sequence
  Description of Artificial Sequence: Synthetic oligonucleotide
auccaucauaaaccaggagga

SEQ ID NO: 3410 - RNA, 21 nt, Artificial Sequence
  Description of Artificial Sequence: Synthetic oligonucleotide
uccaucauaaaccaggaggua

SEQ ID NO: 3411 - RNA, 21 nt, Artificial Sequence
  Description of Artificial Sequence: Synthetic oligonucleotide
ccaucauaaaccaggagguga

SEQ ID NO: 3412 - RNA, 21 nt, Artificial Sequence
  Description of Artificial Sequence: Synthetic oligonucleotide
aucugagaagcuugacuucaa

SEQ ID NO: 3413 - RNA, 21 nt, Artificial Sequence
  Description of Artificial Sequence: Synthetic oligonucleotide
cagcaucgacaugguagacua

SEQ ID NO: 3414 - RNA, 21 nt, Artificial Sequence
  Description of Artificial Sequence: Synthetic oligonucleotide
uggcagcaacaaaggauuuga

SEQ ID NO: 3415 - RNA, 21 nt, Artificial Sequence
  Description of Artificial Sequence: Synthetic oligonucleotide
ggcagcaacaaaggauuugaa

SEQ ID NO: 3416 - RNA, 21 nt, Artificial Sequence
  Description of Artificial Sequence: Synthetic oligonucleotide
agcaacaaaggauuugaaaca

SEQ ID NO: 3417 - RNA, 21 nt, Artificial Sequence
  Description of Artificial Sequence: Synthetic oligonucleotide
caacaaaggauuugaaacuua

SEQ ID NO: 3418 - RNA, 21 nt, Artificial Sequence
  Description of Artificial Sequence: Synthetic oligonucleotide
aacaaaggauuugaaacuuga

SEQ ID NO: 3419 - RNA, 21 nt, Artificial Sequence
  Description of Artificial Sequence: Synthetic oligonucleotide
acaaaggauuugaaacuugga

SEQ ID NO: 3420 - RNA, 21 nt, Artificial Sequence
  Description of Artificial Sequence: Synthetic oligonucleotide
aaggauuugaaacuuggugua

SEQ ID NO: 3421 - RNA, 21 nt, Artificial Sequence
  Description of Artificial Sequence: Synthetic oligonucleotide
gauuugaaacuugguguguua

SEQ ID NO: 3422 - RNA, 21 nt, Artificial Sequence
  Description of Artificial Sequence: Synthetic oligonucleotide
ggcagacgaugucaaccuuga

SEQ ID NO: 3423 - RNA, 21 nt, Artificial Sequence
  Description of Artificial Sequence: Synthetic oligonucleotide
agacgaugucaaccuugugua

SEQ ID NO: 3424 - RNA, 21 nt, Artificial Sequence
  Description of Artificial Sequence: Synthetic oligonucleotide
ggcuaaccaguucucuuugua

SEQ ID NO: 3425 - RNA, 21 nt, Artificial Sequence
  Description of Artificial Sequence: Synthetic oligonucleotide
aaccaguucucuuuguaagga

SEQ ID NO: 3426 - RNA, 21 nt, Artificial Sequence
  Description of Artificial Sequence: Synthetic oligonucleotide
ucucaguuccacucauccaaa

SEQ ID NO: 3427 - RNA, 21 nt, Artificial Sequence
  Description of Artificial Sequence: Synthetic oligonucleotide
uagguguuucugccuuguuga

SEQ ID NO: 3428 - RNA, 21 nt, Artificial Sequence
  Description of Artificial Sequence: Synthetic oligonucleotide
agguguuucugccuuguugaa

SEQ ID NO: 3429 - RNA, 21 nt, Artificial Sequence
  Description of Artificial Sequence: Synthetic oligonucleotide
agcagcugaacauauacauaa

SEQ ID NO: 3430 - RNA, 21 nt, Artificial Sequence
  Description of Artificial Sequence: Synthetic oligonucleotide
agcugaacauauacauagaua

SEQ ID NO: 3431 - RNA, 21 nt, Artificial Sequence
  Description of Artificial Sequence: Synthetic oligonucleotide
gcugaacauauacauagauga

SEQ ID NO: 3432 - RNA, 21 nt, Artificial Sequence
  Description of Artificial Sequence: Synthetic oligonucleotide
gaguuguaguuggauuuguca

SEQ ID NO: 3433 - RNA, 21 nt, Artificial Sequence
  Description of Artificial Sequence: Synthetic oligonucleotide
aguuguaguuggauuugucua

SEQ ID NO: 3434 - RNA, 21 nt, Artificial Sequence
  Description of Artificial Sequence: Synthetic oligonucleotide
uguaguuggauuugucuguua

SEQ ID NO: 3435 - RNA, 21 nt, Artificial Sequence
  Description of Artificial Sequence: Synthetic oligonucleotide
guaguuggauuugucuguuua

SEQ ID NO: 3436 - RNA, 21 nt, Artificial Sequence
  Description of Artificial Sequence: Synthetic oligonucleotide
uuggauuugucuguuuaugca

SEQ ID NO: 3437 - RNA, 21 nt, Artificial Sequence
  Description of Artificial Sequence: Synthetic oligonucleotide
ggauuugucuguuuaugcuua

SEQ ID NO: 3438 - RNA, 21 nt, Artificial Sequence
  Description of Artificial Sequence: Synthetic oligonucleotide
gauuugucuguuuaugcuuga

SEQ ID NO: 3439 - RNA, 21 nt, Artificial Sequence
  Description of Artificial Sequence: Synthetic oligonucleotide
auuugucuguuuaugcuugga

SEQ ID NO: 3440 - RNA, 21 nt, Artificial Sequence
  Description of Artificial Sequence: Synthetic oligonucleotide
uuugucuguuuaugcuuggaa

SEQ ID NO: 3441 - RNA, 21 nt, Artificial Sequence
  Description of Artificial Sequence: Synthetic oligonucleotide
uugucuguuuaugcuuggaua

SEQ ID NO: 3442 - RNA, 21 nt, Artificial Sequence
  Description of Artificial Sequence: Synthetic oligonucleotide
cuguuuaugcuuggauucaca

SEQ ID NO: 3443 - RNA, 21 nt, Artificial Sequence
  Description of Artificial Sequence: Synthetic oligonucleotide
uuuaugcuuggauucaccaga

SEQ ID NO: 3444 - RNA, 21 nt, Artificial Sequence
  Description of Artificial Sequence: Synthetic oligonucleotide
auucaccagagugacuaugaa

SEQ ID NO: 3445 - RNA, 21 nt, Artificial Sequence
  Description of Artificial Sequence: Synthetic oligonucleotide
ucaccagagugacuaugauaa

SEQ ID NO: 3446 - RNA, 21 nt, Artificial Sequence
  Description of Artificial Sequence: Synthetic oligonucleotide
caccagagugacuaugauaga

SEQ ID NO: 3447 - RNA, 21 nt, Artificial Sequence
  Description of Artificial Sequence: Synthetic oligonucleotide
accagagugacuaugauagua

SEQ ID NO: 3448 - RNA, 21 nt, Artificial Sequence
  Description of Artificial Sequence: Synthetic oligonucleotide
ccagagugacuaugauaguga

SEQ ID NO: 3449 - RNA, 21 nt, Artificial Sequence
  Description of Artificial Sequence: Synthetic oligonucleotide
acaugaaaucaucuuagcuua

SEQ ID NO: 3450 - RNA, 21 nt, Artificial Sequence
  Description of Artificial Sequence: Synthetic oligonucleotide
augaaaucaucuuagcuuaga

SEQ ID NO: 3451 - RNA, 21 nt, Artificial Sequence
  Description of Artificial Sequence: Synthetic oligonucleotide
gaaaucaucuuagcuuagcua

SEQ ID NO: 3452 - RNA, 21 nt, Artificial Sequence
  Description of Artificial Sequence: Synthetic oligonucleotide
aaaucaucuuagcuuagcuua

SEQ ID NO: 3453 - RNA, 21 nt, Artificial Sequence
  Description of Artificial Sequence: Synthetic oligonucleotide
gugaaugucuauauaguguaa

SEQ ID NO: 3454 - RNA, 21 nt, Artificial Sequence
  Description of Artificial Sequence: Synthetic oligonucleotide
auauaguguauuguguguuua

SEQ ID NO: 3455 - RNA, 21 nt, Artificial Sequence
  Description of Artificial Sequence: Synthetic oligonucleotide
caaaugauuuacacugacuga

SEQ ID NO: 3456 - RNA, 21 nt, Artificial Sequence
  Description of Artificial Sequence: Synthetic oligonucleotide
aaugauuuacacugacuguua

SEQ ID NO: 3457 - RNA, 23 nt, Artificial Sequence
  Description of Artificial Sequence: Synthetic oligonucleotide
ucaugcgagcuugggucacguga

SEQ ID NO: 3458 - RNA, 23 nt, Artificial Sequence
  Description of Artificial Sequence: Synthetic oligonucleotide
uccaugcgagcuugggucacgug

SEQ ID NO: 3459 - RNA, 23 nt, Artificial Sequence
  Description of Artificial Sequence: Synthetic oligonucleotide
uaccaugcgagcuugggucacgu

SEQ ID NO: 3460 - RNA, 23 nt, Artificial Sequence
  Description of Artificial Sequence: Synthetic oligonucleotide
ugaccaugcgagcuugggucacg

SEQ ID NO: 3461 - RNA, 23 nt, Artificial Sequence
  Description of Artificial Sequence: Synthetic oligonucleotide
uugaccaugcgagcuugggucac

SEQ ID NO: 3462 - RNA, 23 nt, Artificial Sequence
  Description of Artificial Sequence: Synthetic oligonucleotide
ucugaccaugcgagcuuggguca

SEQ ID NO: 3463 - RNA, 23 nt, Artificial Sequence
  Description of Artificial Sequence: Synthetic oligonucleotide
uacugaccaugcgagcuuggguc

SEQ ID NO: 3464 - RNA, 23 nt, Artificial Sequence
  Description of Artificial Sequence: Synthetic oligonucleotide
uuacugaccaugcgagcuugggu

SEQ ID NO: 3465 - RNA, 23 nt, Artificial Sequence
  Description of Artificial Sequence: Synthetic oligonucleotide
uuuacugaccaugcgagcuuggg

SEQ ID NO: 3466 - RNA, 23 nt, Artificial Sequence
  Description of Artificial Sequence: Synthetic oligonucleotide
uuuuuacugaccaugcgagcuug

SEQ ID NO: 3467 - RNA, 23 nt, Artificial Sequence
  Description of Artificial Sequence: Synthetic oligonucleotide
ucuuuuacugaccaugcgagcuu

SEQ ID NO: 3468 - RNA, 23 nt, Artificial Sequence
  Description of Artificial Sequence: Synthetic oligonucleotide
ugcuuuuacugaccaugcgagcu

SEQ ID NO: 3469 - RNA, 23 nt, Artificial Sequence
  Description of Artificial Sequence: Synthetic oligonucleotide
uugcuuuuacugaccaugcgagc

SEQ ID NO: 3470 - RNA, 23 nt, Artificial Sequence
  Description of Artificial Sequence: Synthetic oligonucleotide
uuugcuuuuacugaccaugcgag

SEQ ID NO: 3471 - RNA, 23 nt, Artificial Sequence
  Description of Artificial Sequence: Synthetic oligonucleotide
uuuugcuuuuacugaccaugcga

SEQ ID NO: 3472 - RNA, 23 nt, Artificial Sequence
  Description of Artificial Sequence: Synthetic oligonucleotide
ucuuugcuuuuacugaccaugcg

SEQ ID NO: 3473 - RNA, 23 nt, Artificial Sequence
  Description of Artificial Sequence: Synthetic oligonucleotide
uucuuugcuuuuacugaccaugc

SEQ ID NO: 3474 - RNA, 23 nt, Artificial Sequence
  Description of Artificial Sequence: Synthetic oligonucleotide
ugucuuugcuuuuacugaccaug

SEQ ID NO: 3475 - RNA, 23 nt, Artificial Sequence
  Description of Artificial Sequence: Synthetic oligonucleotide
ucgucuuugcuuuuacugaccau

SEQ ID NO: 3476 - RNA, 23 nt, Artificial Sequence
  Description of Artificial Sequence: Synthetic oligonucleotide
uccgucuuugcuuuuacugacca

SEQ ID NO: 3477 - RNA, 23 nt, Artificial Sequence
  Description of Artificial Sequence: Synthetic oligonucleotide
ucccgucuuugcuuuuacugacc

SEQ ID NO: 3478 - RNA, 23 nt, Artificial Sequence
  Description of Artificial Sequence: Synthetic oligonucleotide
uucccgucuuugcuuuuacugac

SEQ ID NO: 3479 - RNA, 23 nt, Artificial Sequence
  Description of Artificial Sequence: Synthetic oligonucleotide
ugucccgucuuugcuuuuacuga

SEQ ID NO: 3480 - RNA, 23 nt, Artificial Sequence
  Description of Artificial Sequence: Synthetic oligonucleotide
uuuguagacuauuugcacacugc

SEQ ID NO: 3481 - RNA, 23 nt, Artificial Sequence
  Description of Artificial Sequence: Synthetic oligonucleotide
ugguuuguagacuauuugcacac

SEQ ID NO: 3482 - RNA, 23 nt, Artificial Sequence
  Description of Artificial Sequence: Synthetic oligonucleotide
uugguuuguagacuauuugcaca

SEQ ID NO: 3483 - RNA, 23 nt, Artificial Sequence
  Description of Artificial Sequence: Synthetic oligonucleotide
ucugguuuguagacuauuugcac

SEQ ID NO: 3484 - RNA, 23 nt, Artificial Sequence
  Description of Artificial Sequence: Synthetic oligonucleotide
ucaacugguuuguagacuauuug

SEQ ID NO: 3485 - RNA, 23 nt, Artificial Sequence
  Description of Artificial Sequence: Synthetic oligonucleotide
uucaacugguuuguagacuauuu

SEQ ID NO: 3486 - RNA, 23 nt, Artificial Sequence
  Description of Artificial Sequence: Synthetic oligonucleotide
ugucaacugguuuguagacuauu

SEQ ID NO: 3487 - RNA, 23 nt, Artificial Sequence
  Description of Artificial Sequence: Synthetic oligonucleotide
uggucaacugguuuguagacuau

SEQ ID NO: 3488 - RNA, 23 nt, Artificial Sequence
  Description of Artificial Sequence: Synthetic oligonucleotide
uaggucaacugguuuguagacua

SEQ ID NO: 3489 - RNA, 23 nt, Artificial Sequence
  Description of Artificial Sequence: Synthetic oligonucleotide
uucaggucaacugguuuguagac

SEQ ID NO: 3490 - RNA, 23 nt, Artificial Sequence
  Description of Artificial Sequence: Synthetic oligonucleotide
ucucaggucaacugguuuguaga

SEQ ID NO: 3491 - RNA, 23 nt, Artificial Sequence
  Description of Artificial Sequence: Synthetic oligonucleotide
ugcucaggucaacugguuuguag

SEQ ID NO: 3492 - RNA, 23 nt, Artificial Sequence
  Description of Artificial Sequence: Synthetic oligonucleotide
uuugcucaggucaacugguuugu

SEQ ID NO: 3493 - RNA, 23 nt, Artificial Sequence
  Description of Artificial Sequence: Synthetic oligonucleotide
ucuugcucaggucaacugguuug

SEQ ID NO: 3494 - RNA, 23 nt, Artificial Sequence
  Description of Artificial Sequence: Synthetic oligonucleotide
uguuuaugauggauguugccuaa

SEQ ID NO: 3495 - RNA, 23 nt, Artificial Sequence
  Description of Artificial Sequence: Synthetic oligonucleotide
ugguuuaugauggauguugccua

SEQ ID NO: 3496 - RNA, 23 nt, Artificial Sequence
  Description of Artificial Sequence: Synthetic oligonucleotide
uccugguuuaugauggauguugc

SEQ ID NO: 3497 - RNA, 23 nt, Artificial Sequence
  Description of Artificial Sequence: Synthetic oligonucleotide
uuccugguuuaugauggauguug

SEQ ID NO: 3498 - RNA, 23 nt, Artificial Sequence
  Description of Artificial Sequence: Synthetic oligonucleotide
uccuccugguuuaugauggaugu

SEQ ID NO: 3499 - RNA, 23 nt, Artificial Sequence
  Description of Artificial Sequence: Synthetic oligonucleotide
uaccuccugguuuaugauggaug

SEQ ID NO: 3500 - RNA, 23 nt, Artificial Sequence
  Description of Artificial Sequence: Synthetic oligonucleotide
ucaccuccugguuuaugauggau

SEQ ID NO: 3501 - RNA, 23 nt, Artificial Sequence
  Description of Artificial Sequence: Synthetic oligonucleotide
uugaagucaagcuucucagauuu

SEQ ID NO: 3502 - RNA, 23 nt, Artificial Sequence
  Description of Artificial Sequence: Synthetic oligonucleotide
uagucuaccaugucgaugcugcc

SEQ ID NO: 3503 - RNA, 23 nt, Artificial Sequence
  Description of Artificial Sequence: Synthetic oligonucleotide
ucaaauccuuuguugcugccacu

SEQ ID NO: 3504 - RNA, 23 nt, Artificial Sequence
  Description of Artificial Sequence: Synthetic oligonucleotide
uucaaauccuuuguugcugccac

SEQ ID NO: 3505 - RNA, 23 nt, Artificial Sequence
  Description of Artificial Sequence: Synthetic oligonucleotide
uguuucaaauccuuuguugcugc

SEQ ID NO: 3506 - RNA, 23 nt, Artificial Sequence
  Description of Artificial Sequence: Synthetic oligonucleotide
uaaguuucaaauccuuuguugcu

SEQ ID NO: 3507 - RNA, 23 nt, Artificial Sequence
  Description of Artificial Sequence: Synthetic oligonucleotide
ucaaguuucaaauccuuuguugc

SEQ ID NO: 3508 - RNA, 23 nt, Artificial Sequence
  Description of Artificial Sequence: Synthetic oligonucleotide
uccaaguuucaaauccuuuguug

SEQ ID NO: 3509 - RNA, 23 nt, Artificial Sequence
  Description of Artificial Sequence: Synthetic oligonucleotide
uacaccaaguuucaaauccuuug

SEQ ID NO: 3510 - RNA, 23 nt, Artificial Sequence
  Description of Artificial Sequence: Synthetic oligonucleotide
uaacacaccaaguuucaaauccu

SEQ ID NO: 3511 - RNA, 23 nt, Artificial Sequence
  Description of Artificial Sequence: Synthetic oligonucleotide
ucaagguugacaucgucugccug

SEQ ID NO: 3512 - RNA, 23 nt, Artificial Sequence
  Description of Artificial Sequence: Synthetic oligonucleotide
uacacaagguugacaucgucugc

SEQ ID NO: 3513 - RNA, 23 nt, Artificial Sequence
  Description of Artificial Sequence: Synthetic oligonucleotide
uacaaagagaacugguuagcccu

SEQ ID NO: 3514 - RNA, 23 nt, Artificial Sequence
  Description of Artificial Sequence: Synthetic oligonucleotide
uccuuacaaagagaacugguuag

SEQ ID NO: 3515 - RNA, 23 nt, Artificial Sequence
  Description of Artificial Sequence: Synthetic oligonucleotide
uuuggaugaguggaacugagagu

SEQ ID NO: 3516 - RNA, 23 nt, Artificial Sequence
  Description of Artificial Sequence: Synthetic oligonucleotide
ucaacaaggcagaaacaccuagg

SEQ ID NO: 3517 - RNA, 23 nt, Artificial Sequence
  Description of Artificial Sequence: Synthetic oligonucleotide
uucaacaaggcagaaacaccuag

SEQ ID NO: 3518 - RNA, 23 nt, Artificial Sequence
  Description of Artificial Sequence: Synthetic oligonucleotide
uuauguauauguucagcugcucc

SEQ ID NO: 3519 - RNA, 23 nt, Artificial Sequence
  Description of Artificial Sequence: Synthetic oligonucleotide
uaucuauguauauguucagcugc

SEQ ID NO: 3520 - RNA, 23 nt, Artificial Sequence
  Description of Artificial Sequence: Synthetic oligonucleotide
ucaucuauguauauguucagcug

SEQ ID NO: 3521 - RNA, 23 nt, Artificial Sequence
  Description of Artificial Sequence: Synthetic oligonucleotide
ugacaaauccaacuacaacucaa

SEQ ID NO: 3522 - RNA, 23 nt, Artificial Sequence
  Description of Artificial Sequence: Synthetic oligonucleotide
uagacaaauccaacuacaacuca

SEQ ID NO: 3523 - RNA, 23 nt, Artificial Sequence
  Description of Artificial Sequence: Synthetic oligonucleotide
uaacagacaaauccaacuacaac

SEQ ID NO: 3524 - RNA, 23 nt, Artificial Sequence
  Description of Artificial Sequence: Synthetic oligonucleotide
uaaacagacaaauccaacuacaa

SEQ ID NO: 3525 - RNA, 23 nt, Artificial Sequence
  Description of Artificial Sequence: Synthetic oligonucleotide
ugcauaaacagacaaauccaacu

SEQ ID NO: 3526 - RNA, 23 nt, Artificial Sequence
  Description of Artificial Sequence: Synthetic oligonucleotide
uaagcauaaacagacaaauccaa

SEQ ID NO: 3527 - RNA, 23 nt, Artificial Sequence
  Description of Artificial Sequence: Synthetic oligonucleotide
ucaagcauaaacagacaaaucca

SEQ ID NO: 3528 - RNA, 23 nt, Artificial Sequence
  Description of Artificial Sequence: Synthetic oligonucleotide
uccaagcauaaacagacaaaucc

SEQ ID NO: 3529 - RNA, 23 nt, Artificial Sequence
  Description of Artificial Sequence: Synthetic oligonucleotide
uuccaagcauaaacagacaaauc

SEQ ID NO: 3530 - RNA, 23 nt, Artificial Sequence
  Description of Artificial Sequence: Synthetic oligonucleotide
uauccaagcauaaacagacaaau

SEQ ID NO: 3531 - RNA, 23 nt, Artificial Sequence
  Description of Artificial Sequence: Synthetic oligonucleotide
ugugaauccaagcauaaacagac

SEQ ID NO: 3532 - RNA, 23 nt, Artificial Sequence
  Description of Artificial Sequence: Synthetic oligonucleotide
ucuggugaauccaagcauaaaca

SEQ ID NO: 3533 - RNA, 23 nt, Artificial Sequence
  Description of Artificial Sequence: Synthetic oligonucleotide
uucauagucacucuggugaaucc

SEQ ID NO: 3534 - RNA, 23 nt, Artificial Sequence
  Description of Artificial Sequence: Synthetic oligonucleotide
uuaucauagucacucuggugaau

SEQ ID NO: 3535 - RNA, 23 nt, Artificial Sequence
  Description of Artificial Sequence: Synthetic oligonucleotide
ucuaucauagucacucuggugaa

SEQ ID NO: 3536 - RNA, 23 nt, Artificial Sequence
  Description of Artificial Sequence: Synthetic oligonucleotide
uacuaucauagucacucugguga

SEQ ID NO: 3537 - RNA, 23 nt, Artificial Sequence
  Description of Artificial Sequence: Synthetic oligonucleotide
ucacuaucauagucacucuggug

SEQ ID NO: 3538 - RNA, 23 nt, Artificial Sequence
  Description of Artificial Sequence: Synthetic oligonucleotide
uaagcuaagaugauuucaugucc

SEQ ID NO: 3539 - RNA, 23 nt, Artificial Sequence
  Description of Artificial Sequence: Synthetic oligonucleotide
ucuaagcuaagaugauuucaugu

SEQ ID NO: 3540 - RNA, 23 nt, Artificial Sequence
  Description of Artificial Sequence: Synthetic oligonucleotide
uagcuaagcuaagaugauuucau

SEQ ID NO: 3541 - RNA, 23 nt, Artificial Sequence
  Description of Artificial Sequence: Synthetic oligonucleotide
uaagcuaagcuaagaugauuuca

SEQ ID NO: 3542 - RNA, 23 nt, Artificial Sequence
  Description of Artificial Sequence: Synthetic oligonucleotide
uuacacuauauagacauucacag

SEQ ID NO: 3543 - RNA, 23 nt, Artificial Sequence
  Description of Artificial Sequence: Synthetic oligonucleotide
uaaacacacaauacacuauauag

SEQ ID NO: 3544 - RNA, 23 nt, Artificial Sequence
  Description of Artificial Sequence: Synthetic oligonucleotide
ucagucaguguaaaucauuuguu

SEQ ID NO: 3545 - RNA, 23 nt, Artificial Sequence
  Description of Artificial Sequence: Synthetic oligonucleotide
uaacagucaguguaaaucauuug

SEQ ID NO: 3546 - RNA, 21 nt, Artificial Sequence
  Description of Artificial Sequence: Synthetic oligonucleotide
acgugacccaagcucgcauga

SEQ ID NO: 3547 - RNA, 21 nt, Artificial Sequence
  Description of Artificial Sequence: Synthetic oligonucleotide
cgugacccaagcucgcaugga

SEQ ID NO: 3548 - RNA, 21 nt, Artificial Sequence
  Description of Artificial Sequence: Synthetic oligonucleotide
gugacccaagcucgcauggua

SEQ ID NO: 3549 - RNA, 21 nt, Artificial Sequence
  Description of Artificial Sequence: Synthetic oligonucleotide
ugacccaagcucgcaugguca

SEQ ID NO: 3550 - RNA, 21 nt, Artificial Sequence
  Description of Artificial Sequence: Synthetic oligonucleotide
gacccaagcucgcauggucaa

SEQ ID NO: 3551 - RNA, 21 nt, Artificial Sequence
  Description of Artificial Sequence: Synthetic oligonucleotide
acccaagcucgcauggucaga

SEQ ID NO: 3552 - RNA, 21 nt, Artificial Sequence
  Description of Artificial Sequence: Synthetic oligonucleotide
cccaagcucgcauggucagua

SEQ ID NO: 3553 - RNA, 21 nt, Artificial Sequence
  Description of Artificial Sequence: Synthetic oligonucleotide
ccaagcucgcauggucaguaa

SEQ ID NO: 3554 - RNA, 21 nt, Artificial Sequence
  Description of Artificial Sequence: Synthetic oligonucleotide
caagcucgcauggucaguaaa

SEQ ID NO: 3555 - RNA, 21 nt, Artificial Sequence
  Description of Artificial Sequence: Synthetic oligonucleotide
agcucgcauggucaguaaaaa

SEQ ID NO: 3556 - RNA, 21 nt, Artificial Sequence
  Description of Artificial Sequence: Synthetic oligonucleotide
gcucgcauggucaguaaaaga

SEQ ID NO: 3557 - RNA, 21 nt, Artificial Sequence
  Description of Artificial Sequence: Synthetic oligonucleotide
cucgcauggucaguaaaagca

SEQ ID NO: 3558 - RNA, 21 nt, Artificial Sequence
  Description of Artificial Sequence: Synthetic oligonucleotide
ucgcauggucaguaaaagcaa

SEQ ID NO: 3559 - RNA, 21 nt, Artificial Sequence
  Description of Artificial Sequence: Synthetic oligonucleotide
cgcauggucaguaaaagcaaa

SEQ ID NO: 3560 - RNA, 21 nt, Artificial Sequence
  Description of Artificial Sequence: Synthetic oligonucleotide
gcauggucaguaaaagcaaaa

SEQ ID NO: 3561 - RNA, 21 nt, Artificial Sequence
  Description of Artificial Sequence: Synthetic oligonucleotide
cauggucaguaaaagcaaaga

SEQ ID NO: 3562 - RNA, 21 nt, Artificial Sequence
  Description of Artificial Sequence: Synthetic oligonucleotide
auggucaguaaaagcaaagaa

SEQ ID NO: 3563 - RNA, 21 nt, Artificial Sequence
  Description of Artificial Sequence: Synthetic oligonucleotide
uggucaguaaaagcaaagaca

SEQ ID NO: 3564 - RNA, 21 nt, Artificial Sequence
  Description of Artificial Sequence: Synthetic oligonucleotide
ggucaguaaaagcaaagacga

SEQ ID NO: 3565 - RNA, 21 nt, Artificial Sequence
  Description of Artificial Sequence: Synthetic oligonucleotide
gucaguaaaagcaaagacgga

SEQ ID NO: 3566 - RNA, 21 nt, Artificial Sequence
  Description of Artificial Sequence: Synthetic oligonucleotide
ucaguaaaagcaaagacggga

SEQ ID NO: 3567 - RNA, 21 nt, Artificial Sequence
  Description of Artificial Sequence: Synthetic oligonucleotide
caguaaaagcaaagacgggaa

SEQ ID NO: 3568 - RNA, 21 nt, Artificial Sequence
  Description of Artificial Sequence: Synthetic oligonucleotide
aguaaaagcaaagacgggaca

SEQ ID NO: 3569 - RNA, 21 nt, Artificial Sequence
  Description of Artificial Sequence: Synthetic oligonucleotide
agugugcaaauagucuacaaa

SEQ ID NO: 3570 - RNA, 21 nt, Artificial Sequence
  Description of Artificial Sequence: Synthetic oligonucleotide
gugcaaauagucuacaaacca

SEQ ID NO: 3571 - RNA, 21 nt, Artificial Sequence
  Description of Artificial Sequence: Synthetic oligonucleotide
ugcaaauagucuacaaaccaa

SEQ ID NO: 3572 - RNA, 21 nt, Artificial Sequence
  Description of Artificial Sequence: Synthetic oligonucleotide
gcaaauagucuacaaaccaga

SEQ ID NO: 3573 - RNA, 21 nt, Artificial Sequence
  Description of Artificial Sequence: Synthetic oligonucleotide
aauagucuacaaaccaguuga

SEQ ID NO: 3574 - RNA, 21 nt, Artificial Sequence
  Description of Artificial Sequence: Synthetic oligonucleotide
auagucuacaaaccaguugaa

SEQ ID NO: 3575 - RNA, 21 nt, Artificial Sequence
  Description of Artificial Sequence: Synthetic oligonucleotide
uagucuacaaaccaguugaca

SEQ ID NO: 3576 - RNA, 21 nt, Artificial Sequence
  Description of Artificial Sequence: Synthetic oligonucleotide
agucuacaaaccaguugacca

SEQ ID NO: 3577 - RNA, 21 nt, Artificial Sequence
  Description of Artificial Sequence: Synthetic oligonucleotide
gucuacaaaccaguugaccua

SEQ ID NO: 3578 - RNA, 21 nt, Artificial Sequence
  Description of Artificial Sequence: Synthetic oligonucleotide
cuacaaaccaguugaccugaa

SEQ ID NO: 3579 - RNA, 21 nt, Artificial Sequence
  Description of Artificial Sequence: Synthetic oligonucleotide
uacaaaccaguugaccugaga

SEQ ID NO: 3580 - RNA, 21 nt, Artificial Sequence
  Description of Artificial Sequence: Synthetic oligonucleotide
acaaaccaguugaccugagca

SEQ ID NO: 3581 - RNA, 21 nt, Artificial Sequence
  Description of Artificial Sequence: Synthetic oligonucleotide
aaaccaguugaccugagcaaa

SEQ ID NO: 3582 - RNA, 21 nt, Artificial Sequence
  Description of Artificial Sequence: Synthetic oligonucleotide
aaccaguugaccugagcaaga

SEQ ID NO: 3583 - RNA, 21 nt, Artificial Sequence
  Description of Artificial Sequence: Synthetic oligonucleotide
aggcaacauccaucauaaaca

SEQ ID NO: 3584 - RNA, 21 nt, Artificial Sequence
  Description of Artificial Sequence: Synthetic oligonucleotide
ggcaacauccaucauaaacca

SEQ ID NO: 3585 - RNA, 21 nt, Artificial Sequence
  Description of Artificial Sequence: Synthetic oligonucleotide
aacauccaucauaaaccagga

SEQ ID NO: 3586 - RNA, 21 nt, Artificial Sequence
  Description of Artificial Sequence: Synthetic oligonucleotide
acauccaucauaaaccaggaa

SEQ ID NO: 3587 - RNA, 21 nt, Artificial Sequence
  Description of Artificial Sequence: Synthetic oligonucleotide
auccaucauaaaccaggagga

SEQ ID NO: 3588 - RNA, 21 nt, Artificial Sequence
  Description of Artificial Sequence: Synthetic oligonucleotide
uccaucauaaaccaggaggua

SEQ ID NO: 3589 - RNA, 21 nt, Artificial Sequence
  Description of Artificial Sequence: Synthetic oligonucleotide
ccaucauaaaccaggagguga

SEQ ID NO: 3590 - RNA, 21 nt, Artificial Sequence
  Description of Artificial Sequence: Synthetic oligonucleotide
aucugagaagcuugacuucaa

SEQ ID NO: 3591 - RNA, 21 nt, Artificial Sequence
  Description of Artificial Sequence: Synthetic oligonucleotide
cagcaucgacaugguagacua

SEQ ID NO: 3592 - RNA, 21 nt, Artificial Sequence
  Description of Artificial Sequence: Synthetic oligonucleotide
uggcagcaacaaaggauuuga

SEQ ID NO: 3593 - RNA, 21 nt, Artificial Sequence
  Description of Artificial Sequence: Synthetic oligonucleotide
ggcagcaacaaaggauuugaa

SEQ ID NO: 3594 - RNA, 21 nt, Artificial Sequence
  Description of Artificial Sequence: Synthetic oligonucleotide
agcaacaaaggauuugaaaca

SEQ ID NO: 3595 - RNA, 21 nt, Artificial Sequence
  Description of Artificial Sequence: Synthetic oligonucleotide
caacaaaggauuugaaacuua

SEQ ID NO: 3596 - RNA, 21 nt, Artificial Sequence
  Description of Artificial Sequence: Synthetic oligonucleotide
aacaaaggauuugaaacuuga

SEQ ID NO: 3597 - RNA, 21 nt, Artificial Sequence
  Description of Artificial Sequence: Synthetic oligonucleotide
acaaaggauuugaaacuugga

SEQ ID NO: 3598 - RNA, 21 nt, Artificial Sequence
  Description of Artificial Sequence: Synthetic oligonucleotide
aaggauuugaaacuuggugua

SEQ ID NO: 3599 - RNA, 21 nt, Artificial Sequence
  Description of Artificial Sequence: Synthetic oligonucleotide
gauuugaaacuugguguguua

SEQ ID NO: 3600 - RNA, 21 nt, Artificial Sequence
  Description of Artificial Sequence: Synthetic oligonucleotide
ggcagacgaugucaaccuuga

SEQ ID NO: 3601 - RNA, 21 nt, Artificial Sequence
  Description of Artificial Sequence: Synthetic oligonucleotide
agacgaugucaaccuugugua

SEQ ID NO: 3602 - RNA, 21 nt, Artificial Sequence
  Description of Artificial Sequence: Synthetic oligonucleotide
ggcuaaccaguucucuuugua

SEQ ID NO: 3603 - RNA, 21 nt, Artificial Sequence
  Description of Artificial Sequence: Synthetic oligonucleotide
aaccaguucucuuuguaagga

SEQ ID NO: 3604 - RNA, 21 nt, Artificial Sequence
  Description of Artificial Sequence: Synthetic oligonucleotide
ucucaguuccacucauccaaa

SEQ ID NO: 3605 - RNA, 21 nt, Artificial Sequence
  Description of Artificial Sequence: Synthetic oligonucleotide
uagguguuucugccuuguuga

SEQ ID NO: 3606 - RNA, 21 nt, Artificial Sequence
  Description of Artificial Sequence: Synthetic oligonucleotide
agguguuucugccuuguugaa

SEQ ID NO: 3607 - RNA, 21 nt, Artificial Sequence
  Description of Artificial Sequence: Synthetic oligonucleotide
agcagcugaacauauacauaa

SEQ ID NO: 3608 - RNA, 21 nt, Artificial Sequence
  Description of Artificial Sequence: Synthetic oligonucleotide
agcugaacauauacauagaua

SEQ ID NO: 3609 - RNA, 21 nt, Artificial Sequence
  Description of Artificial Sequence: Synthetic oligonucleotide
gcugaacauauacauagauga

SEQ ID NO: 3610 - RNA, 21 nt, Artificial Sequence
  Description of Artificial Sequence: Synthetic oligonucleotide
gaguuguaguuggauuuguca

SEQ ID NO: 3611 - RNA, 21 nt, Artificial Sequence
  Description of Artificial Sequence: Synthetic oligonucleotide
aguuguaguuggauuugucua

SEQ ID NO: 3612 - RNA, 21 nt, Artificial Sequence
  Description of Artificial Sequence: Synthetic oligonucleotide
uguaguuggauuugucuguua

SEQ ID NO: 3613 - RNA, 21 nt, Artificial Sequence
  Description of Artificial Sequence: Synthetic oligonucleotide
guaguuggauuugucuguuua

SEQ ID NO: 3614 - RNA, 21 nt, Artificial Sequence
  Description of Artificial Sequence: Synthetic oligonucleotide
uuggauuugucuguuuaugca

SEQ ID NO: 3615 - RNA, 21 nt, Artificial Sequence
  Description of Artificial Sequence: Synthetic oligonucleotide
ggauuugucuguuuaugcuua

SEQ ID NO: 3616 - RNA, 21 nt, Artificial Sequence
  Description of Artificial Sequence: Synthetic oligonucleotide
gauuugucuguuuaugcuuga

SEQ ID NO: 3617 - RNA, 21 nt, Artificial Sequence
  Description of Artificial Sequence: Synthetic oligonucleotide
auuugucuguuuaugcuugga

SEQ ID NO: 3618 - RNA, 21 nt, Artificial Sequence
  Description of Artificial Sequence: Synthetic oligonucleotide
uuugucuguuuaugcuuggaa

SEQ ID NO: 3619 - RNA, 21 nt, Artificial Sequence
  Description of Artificial Sequence: Synthetic oligonucleotide
uugucuguuuaugcuuggaua

SEQ ID NO: 3620 - RNA, 21 nt, Artificial Sequence
  Description of Artificial Sequence: Synthetic oligonucleotide
cuguuuaugcuuggauucaca

SEQ ID NO: 3621 - RNA, 21 nt, Artificial Sequence
  Description of Artificial Sequence: Synthetic oligonucleotide
uuuaugcuuggauucaccaga

SEQ ID NO: 3622 - RNA, 21 nt, Artificial Sequence
  Description of Artificial Sequence: Synthetic oligonucleotide
auucaccagagugacuaugaa

SEQ ID NO: 3623 - RNA, 21 nt, Artificial Sequence
  Description of Artificial Sequence: Synthetic oligonucleotide
ucaccagagugacuaugauaa

SEQ ID NO: 3624 - RNA, 21 nt, Artificial Sequence
  Description of Artificial Sequence: Synthetic oligonucleotide
caccagagugacuaugauaga

SEQ ID NO: 3625 - RNA, 21 nt, Artificial Sequence
  Description of Artificial Sequence: Synthetic oligonucleotide
accagagugacuaugauagua

SEQ ID NO: 3626 - RNA, 21 nt, Artificial Sequence
  Description of Artificial Sequence: Synthetic oligonucleotide
ccagagugacuaugauaguga

SEQ ID NO: 3627 - RNA, 21 nt, Artificial Sequence
  Description of Artificial Sequence: Synthetic oligonucleotide
acaugaaaucaucuuagcuua

SEQ ID NO: 3628 - RNA, 21 nt, Artificial Sequence
  Description of Artificial Sequence: Synthetic oligonucleotide
augaaaucaucuuagcuuaga

SEQ ID NO: 3629 - RNA, 21 nt, Artificial Sequence
  Description of Artificial Sequence: Synthetic oligonucleotide
gaaaucaucuuagcuuagcua

SEQ ID NO: 3630 - RNA, 21 nt, Artificial Sequence
  Description of Artificial Sequence: Synthetic oligonucleotide
aaaucaucuuagcuuagcuua

SEQ ID NO: 3631 - RNA, 21 nt, Artificial Sequence
  Description of Artificial Sequence: Synthetic oligonucleotide
gugaaugucuauauaguguaa

SEQ ID NO: 3632 - RNA, 21 nt, Artificial Sequence
  Description of Artificial Sequence: Synthetic oligonucleotide
auauaguguauuguguguuua

SEQ ID NO: 3633 - RNA, 21 nt, Artificial Sequence
  Description of Artificial Sequence: Synthetic oligonucleotide
caaaugauuuacacugacuga

SEQ ID NO: 3634 - RNA, 21 nt, Artificial Sequence
  Description of Artificial Sequence: Synthetic oligonucleotide
aaugauuuacacugacuguua

SEQ ID NO: 3635 - RNA, 23 nt, Artificial Sequence
  Description of Artificial Sequence: Synthetic oligonucleotide
ucaugcgagcuugggucacguga

SEQ ID NO: 3636 - RNA, 23 nt, Artificial Sequence
  Description of Artificial Sequence: Synthetic oligonucleotide
uccaugcgagcuugggucacgug

SEQ ID NO: 3637 - RNA, 23 nt, Artificial Sequence
  Description of Artificial Sequence: Synthetic oligonucleotide
uaccaugcgagcuugggucacgu

SEQ ID NO: 3638 - RNA, 23 nt, Artificial Sequence
  Description of Artificial Sequence: Synthetic oligonucleotide
ugaccaugcgagcuugggucacg

SEQ ID NO: 3639 - RNA, 23 nt, Artificial Sequence
  Description of Artificial Sequence: Synthetic oligonucleotide
uugaccaugcgagcuugggucac

SEQ ID NO: 3640 - RNA, 23 nt, Artificial Sequence
  Description of Artificial Sequence: Synthetic oligonucleotide
ucugaccaugcgagcuuggguca

SEQ ID NO: 3641 - RNA, 23 nt, Artificial Sequence
  Description of Artificial Sequence: Synthetic oligonucleotide
uacugaccaugcgagcuuggguc

SEQ ID NO: 3642 - RNA, 23 nt, Artificial Sequence
  Description of Artificial Sequence: Synthetic oligonucleotide
uuacugaccaugcgagcuugggu

SEQ ID NO: 3643 - RNA, 23 nt, Artificial Sequence
  Description of Artificial Sequence: Synthetic oligonucleotide
uuuacugaccaugcgagcuuggg

SEQ ID NO: 3644 - RNA, 23 nt, Artificial Sequence
  Description of Artificial Sequence: Synthetic oligonucleotide
uuuuuacugaccaugcgagcuug

SEQ ID NO: 3645 - RNA, 23 nt, Artificial Sequence
  Description of Artificial Sequence: Synthetic oligonucleotide
ucuuuuacugaccaugcgagcuu

SEQ ID NO: 3646 - RNA, 23 nt, Artificial Sequence
  Description of Artificial Sequence: Synthetic oligonucleotide
ugcuuuuacugaccaugcgagcu

SEQ ID NO: 3647 - RNA, 23 nt, Artificial Sequence
  Description of Artificial Sequence: Synthetic oligonucleotide
uugcuuuuacugaccaugcgagc

SEQ ID NO: 3648 - RNA, 23 nt, Artificial Sequence
  Description of Artificial Sequence: Synthetic oligonucleotide
uuugcuuuuacugaccaugcgag

SEQ ID NO: 3649 - RNA, 23 nt, Artificial Sequence
  Description of Artificial Sequence: Synthetic oligonucleotide
uuuugcuuuuacugaccaugcga

SEQ ID NO: 3650 - RNA, 23 nt, Artificial Sequence
  Description of Artificial Sequence: Synthetic oligonucleotide
ucuuugcuuuuacugaccaugcg

SEQ ID NO: 3651 - RNA, 23 nt, Artificial Sequence
  Description of Artificial Sequence: Synthetic oligonucleotide
uucuuugcuuuuacugaccaugc

SEQ ID NO: 3652 - RNA, 23 nt, Artificial Sequence
  Description of Artificial Sequence: Synthetic oligonucleotide
ugucuuugcuuuuacugaccaug

SEQ ID NO: 3653 - RNA, 23 nt, Artificial Sequence
  Description of Artificial Sequence: Synthetic oligonucleotide
ucgucuuugcuuuuacugaccau

SEQ ID NO: 3654 - RNA, 23 nt, Artificial Sequence
  Description of Artificial Sequence: Synthetic oligonucleotide
uccgucuuugcuuuuacugacca

SEQ ID NO: 3655 - RNA, 23 nt, Artificial Sequence
  Description of Artificial Sequence: Synthetic oligonucleotide
ucccgucuuugcuuuuacugacc

SEQ ID NO: 3656 - RNA, 23 nt, Artificial Sequence
  Description of Artificial Sequence: Synthetic oligonucleotide
uucccgucuuugcuuuuacugac

SEQ ID NO: 3657 - RNA, 23 nt, Artificial Sequence
  Description of Artificial Sequence: Synthetic oligonucleotide
ugucccgucuuugcuuuuacuga

SEQ ID NO: 3658 - RNA, 23 nt, Artificial Sequence
  Description of Artificial Sequence: Synthetic oligonucleotide
uuuguagacuauuugcacacugc

SEQ ID NO: 3659 - RNA, 23 nt, Artificial Sequence
  Description of Artificial Sequence: Synthetic oligonucleotide
ugguuuguagacuauuugcacac

SEQ ID NO: 3660 - RNA, 23 nt, Artificial Sequence
  Description of Artificial Sequence: Synthetic oligonucleotide
uugguuuguagacuauuugcaca

SEQ ID NO: 3661 - RNA, 23 nt, Artificial Sequence
  Description of Artificial Sequence: Synthetic oligonucleotide
ucugguuuguagacuauuugcac

SEQ ID NO: 3662 - RNA, 23 nt, Artificial Sequence
  Description of Artificial Sequence: Synthetic oligonucleotide
ucaacugguuuguagacuauuug

SEQ ID NO: 3663 - RNA, 23 nt, Artificial Sequence
  Description of Artificial Sequence: Synthetic oligonucleotide
uucaacugguuuguagacuauuu

SEQ ID NO: 3664 - RNA, 23 nt, Artificial Sequence
  Description of Artificial Sequence: Synthetic oligonucleotide
ugucaacugguuuguagacuauu

SEQ ID NO: 3665 - RNA, 23 nt, Artificial Sequence
  Description of Artificial Sequence: Synthetic oligonucleotide
uggucaacugguuuguagacuau

SEQ ID NO: 3666 - RNA, 23 nt, Artificial Sequence
  Description of Artificial Sequence: Synthetic oligonucleotide
uaggucaacugguuuguagacua

SEQ ID NO: 3667 - RNA, 23 nt, Artificial Sequence
  Description of Artificial Sequence: Synthetic oligonucleotide
uucaggucaacugguuuguagac

SEQ ID NO: 3668 - RNA, 23 nt, Artificial Sequence
  Description of Artificial Sequence: Synthetic oligonucleotide
ucucaggucaacugguuuguaga

SEQ ID NO: 3669 - RNA, 23 nt, Artificial Sequence
  Description of Artificial Sequence: Synthetic oligonucleotide
ugcucaggucaacugguuuguag

SEQ ID NO: 3670 - RNA, 23 nt, Artificial Sequence
  Description of Artificial Sequence: Synthetic oligonucleotide
uuugcucaggucaacugguuugu

SEQ ID NO: 3671 - RNA, 23 nt, Artificial Sequence
  Description of Artificial Sequence: Synthetic oligonucleotide
ucuugcucaggucaacugguuug

SEQ ID NO: 3672 - RNA, 23 nt, Artificial Sequence
  Description of Artificial Sequence: Synthetic oligonucleotide
uguuuaugauggauguugccuaa

SEQ ID NO: 3673 - RNA, 23 nt, Artificial Sequence
  Description of Artificial Sequence: Synthetic oligonucleotide
ugguuuaugauggauguugccua

SEQ ID NO: 3674 - RNA, 23 nt, Artificial Sequence
  Description of Artificial Sequence: Synthetic oligonucleotide
uccugguuuaugauggauguugc

SEQ ID NO: 3675 - RNA, 23 nt, Artificial Sequence
  Description of Artificial Sequence: Synthetic oligonucleotide
uuccugguuuaugauggauguug

SEQ ID NO: 3676 - RNA, 23 nt, Artificial Sequence
  Description of Artificial Sequence: Synthetic oligonucleotide
uccuccugguuuaugauggaugu

SEQ ID NO: 3677 - RNA, 23 nt, Artificial Sequence
  Description of Artificial Sequence: Synthetic oligonucleotide
uaccuccugguuuaugauggaug

SEQ ID NO: 3678 - RNA, 23 nt, Artificial Sequence
  Description of Artificial Sequence: Synthetic oligonucleotide
ucaccuccugguuuaugauggau

SEQ ID NO: 3679 - RNA, 23 nt, Artificial Sequence
  Description of Artificial Sequence: Synthetic oligonucleotide
uugaagucaagcuucucagauuu

SEQ ID NO: 3680 - RNA, 23 nt, Artificial Sequence
  Description of Artificial Sequence: Synthetic oligonucleotide
uagucuaccaugucgaugcugcc

SEQ ID NO: 3681 - RNA, 23 nt, Artificial Sequence
  Description of Artificial Sequence: Synthetic oligonucleotide
ucaaauccuuuguugcugccacu

SEQ ID NO: 3682 - RNA, 23 nt, Artificial Sequence
  Description of Artificial Sequence: Synthetic oligonucleotide
uucaaauccuuuguugcugccac

SEQ ID NO: 3683 - RNA, 23 nt, Artificial Sequence
  Description of Artificial Sequence: Synthetic oligonucleotide
uguuucaaauccuuuguugcugc

SEQ ID NO: 3684 - RNA, 23 nt, Artificial Sequence
  Description of Artificial Sequence: Synthetic oligonucleotide
uaaguuucaaauccuuuguugcu

SEQ ID NO: 3685 - RNA, 23 nt, Artificial Sequence
  Description of Artificial Sequence: Synthetic oligonucleotide
ucaaguuucaaauccuuuguugc

SEQ ID NO: 3686 - RNA, 23 nt, Artificial Sequence
  Description of Artificial Sequence: Synthetic oligonucleotide
uccaaguuucaaauccuuuguug

SEQ ID NO: 3687 - RNA, 23 nt, Artificial Sequence
  Description of Artificial Sequence: Synthetic oligonucleotide
uacaccaaguuucaaauccuuug

SEQ ID NO: 3688 - RNA, 23 nt, Artificial Sequence
  Description of Artificial Sequence: Synthetic oligonucleotide
uaacacaccaaguuucaaauccu

SEQ ID NO: 3689 - RNA, 23 nt, Artificial Sequence
  Description of Artificial Sequence: Synthetic oligonucleotide
ucaagguugacaucgucugccug

SEQ ID NO: 3690 - RNA, 23 nt, Artificial Sequence
  Description of Artificial Sequence: Synthetic oligonucleotide
uacacaagguugacaucgucugc

SEQ ID NO: 3691 - RNA, 23 nt, Artificial Sequence
  Description of Artificial Sequence: Synthetic oligonucleotide
uacaaagagaacugguuagcccu

SEQ ID NO: 3692 - RNA, 23 nt, Artificial Sequence
  Description of Artificial Sequence: Synthetic oligonucleotide
uccuuacaaagagaacugguuag

SEQ ID NO: 3693 - RNA, 23 nt, Artificial Sequence
  Description of Artificial Sequence: Synthetic oligonucleotide
uuuggaugaguggaacugagagu

SEQ ID NO: 3694 - RNA, 23 nt, Artificial Sequence
  Description of Artificial Sequence: Synthetic oligonucleotide
ucaacaaggcagaaacaccuagg

SEQ ID NO: 3695 - RNA, 23 nt, Artificial Sequence
  Description of Artificial Sequence: Synthetic oligonucleotide
uucaacaaggcagaaacaccuag

SEQ ID NO: 3696 - RNA, 23 nt, Artificial Sequence
  Description of Artificial Sequence: Synthetic oligonucleotide
uuauguauauguucagcugcucc

SEQ ID NO: 3697 - RNA, 23 nt, Artificial Sequence
  Description of Artificial Sequence: Synthetic oligonucleotide
uaucuauguauauguucagcugc

SEQ ID NO: 3698 - RNA, 23 nt, Artificial Sequence
  Description of Artificial Sequence: Synthetic oligonucleotide
ucaucuauguauauguucagcug

SEQ ID NO: 3699 - RNA, 23 nt, Artificial Sequence
  Description of Artificial Sequence: Synthetic oligonucleotide
ugacaaauccaacuacaacucaa

SEQ ID NO: 3700 - RNA, 23 nt, Artificial Sequence
  Description of Artificial Sequence: Synthetic oligonucleotide
uagacaaauccaacuacaacuca

SEQ ID NO: 3701 - RNA, 23 nt, Artificial Sequence
  Description of Artificial Sequence: Synthetic oligonucleotide
uaacagacaaauccaacuacaac

SEQ ID NO: 3702 - RNA, 23 nt, Artificial Sequence
  Description of Artificial Sequence: Synthetic oligonucleotide
uaaacagacaaauccaacuacaa

SEQ ID NO: 3703 - RNA, 23 nt, Artificial Sequence
  Description of Artificial Sequence: Synthetic oligonucleotide
ugcauaaacagacaaauccaacu

SEQ ID NO: 3704 - RNA, 23 nt, Artificial Sequence
  Description of Artificial Sequence: Synthetic oligonucleotide
uaagcauaaacagacaaauccaa

SEQ ID NO: 3705 - RNA, 23 nt, Artificial Sequence
  Description of Artificial Sequence: Synthetic oligonucleotide
ucaagcauaaacagacaaaucca

SEQ ID NO: 3706 - RNA, 23 nt, Artificial Sequence
  Description of Artificial Sequence: Synthetic oligonucleotide
uccaagcauaaacagacaaaucc

SEQ ID NO: 3707 - RNA, 23 nt, Artificial Sequence
  Description of Artificial Sequence: Synthetic oligonucleotide
uuccaagcauaaacagacaaauc

SEQ ID NO: 3708 - RNA, 23 nt, Artificial Sequence
  Description of Artificial Sequence: Synthetic oligonucleotide
uauccaagcauaaacagacaaau

SEQ ID NO: 3709 - RNA, 23 nt, Artificial Sequence
  Description of Artificial Sequence: Synthetic oligonucleotide
ugugaauccaagcauaaacagac

SEQ ID NO: 3710 - RNA, 23 nt, Artificial Sequence
  Description of Artificial Sequence: Synthetic oligonucleotide
ucuggugaauccaagcauaaaca

SEQ ID NO: 3711 - RNA, 23 nt, Artificial Sequence
  Description of Artificial Sequence: Synthetic oligonucleotide
uucauagucacucuggugaaucc

SEQ ID NO: 3712 - RNA, 23 nt, Artificial Sequence
  Description of Artificial Sequence: Synthetic oligonucleotide
uuaucauagucacucuggugaau

SEQ ID NO: 3713 - RNA, 23 nt, Artificial Sequence
  Description of Artificial Sequence: Synthetic oligonucleotide
ucuaucauagucacucuggugaa

SEQ ID NO: 3714 - RNA, 23 nt, Artificial Sequence
  Description of Artificial Sequence: Synthetic oligonucleotide
uacuaucauagucacucugguga

SEQ ID NO: 3715 - RNA, 23 nt, Artificial Sequence
  Description of Artificial Sequence: Synthetic oligonucleotide
ucacuaucauagucacucuggug

SEQ ID NO: 3716 - RNA, 23 nt, Artificial Sequence
  Description of Artificial Sequence: Synthetic oligonucleotide
uaagcuaagaugauuucaugucc

SEQ ID NO: 3717 - RNA, 23 nt, Artificial Sequence
  Description of Artificial Sequence: Synthetic oligonucleotide
ucuaagcuaagaugauuucaugu

SEQ ID NO: 3718 - RNA, 23 nt, Artificial Sequence
  Description of Artificial Sequence: Synthetic oligonucleotide
uagcuaagcuaagaugauuucau

SEQ ID NO: 3719 - RNA, 23 nt, Artificial Sequence
  Description of Artificial Sequence: Synthetic oligonucleotide
uaagcuaagcuaagaugauuuca

SEQ ID NO: 3720 - RNA, 23 nt, Artificial Sequence
  Description of Artificial Sequence: Synthetic oligonucleotide
uuacacuauauagacauucacag

SEQ ID NO: 3721 - RNA, 23 nt, Artificial Sequence
  Description of Artificial Sequence: Synthetic oligonucleotide
uaaacacacaauacacuauauag

SEQ ID NO: 3722 - RNA, 23 nt, Artificial Sequence
  Description of Artificial Sequence: Synthetic oligonucleotide
ucagucaguguaaaucauuuguu

SEQ ID NO: 3723 - RNA, 23 nt, Artificial Sequence
  Description of Artificial Sequence: Synthetic oligonucleotide
uaacagucaguguaaaucauuug

We claim:

1. A double stranded ribonucleic acid (dsRNA) agent for inhibiting expression of MAPT, wherein the dsRNA agent comprises a sense strand and an antisense strand forming a double stranded region,
wherein the sense strand comprises at least 15 contiguous nucleotides differing by no more than 3 nucleotides from the nucleotide sequence selected from a group consisting of SEQ ID NO: 1 and SEQ ID NO: 3, and the antisense strand comprises at least 15 contiguous nucleotides differing by no more than 3 nucleotides from the nucleotide sequence selected from a group consisting of SEQ ID NO: 2 and SEQ ID NO: 4.

2. A double stranded ribonucleic acid (dsRNA) agent for inhibiting expression of MAPT, wherein the dsRNA agent comprises a sense strand and an antisense strand forming a double stranded region,
wherein the antisense strand comprises a region of complementarity to an mRNA encoding Tau, and wherein the region of complementarity comprises at least 15 contiguous nucleotides differing by no more than 3 nucleotides from the nucleotide sequence selected from a group consisting of SEQ ID NO:2 and SEQ ID NO: 4.

3. A double stranded ribonucleic acid (dsRNA) agent for inhibiting expression of MAPT, wherein the dsRNA agent comprises a sense strand and an antisense strand forming a double stranded region,
wherein the antisense strand comprises a region of complementarity to an mRNA encoding Tau, and wherein the region of complementarity comprises at least 15 contiguous nucleotides differing by no more than 3 nucleotides from any one of the antisense nucleotide sequences in any one of Tables 3-8 and 16-28.

4. The dsRNA agent of any one of claims 1-3, wherein the sense strand comprises at least 15 contiguous nucleotides differing by no more than three nucleotides from any one of the nucleotide sequence of nucleotides 512-532, 513-533, 514-534, 515-535, 516-536, 517-537, 518-538, 519-539, 520-540, 1063-1083, 1067-1087, 1072-1092, 1074-1094, 1075-1095, 1125-1145, 1126-1146, 1127-1147, 1129-1149, 1170-1190, 1395-1415, 1905-1925, 1906-1926, 1909-1929, 1911-1931, 1912-1932, 1913-1933, 1914-1934, 1915-1935, 1916-1936, 1919-1939, 1951-1971, 1954-1974, 1958-1978, 2387-2407, 2409-2429, 2410-2430, 2469-2489, 2471-2491, 2472-2492, 2476-2496, 2477-2497, 2478-2498, 2480-2500, 2481-2501, 2482-2502, 2484-2504, 2762-2782, 2764-2784, 2766-2786, 2767-2787, 2768-2788, 2769-2789, 2819-2839, 2821-2841, 2828-2848, 2943-2963, 2944-2964, 2946-2966, 2947-2967, 3252-3272, 3277-3297, 3280-3300, 3281-3301, 3282-3302, 3284-3304, 3285-3305, 3286-3306, 3331-3351, 3332-3352, 3333-3353, 3334-3354, 3335-3355, 3336-3356, 3338-3358, 3340-3360, 3342-3362, 3343-3363, 3344-3364, 3345-3365, 3346-3366, 3347-3367, 3349-3369, 3350-3370, 3353-3373, 3364-3384, 3366-3386, 3367-3387, 3368-3388, 3369-3389, 3370-3390, 3412-3432, 3414-3434, 3415-3435, 3416-3436, 3417-3437, 3419-3439, 3420-3440, 3424-3444, 3425-3445, 3426-3446, 3427-3447, 3428-3448, 3429-3449, 3430-3450, 3431-3451, 3434-3454, 4132-4152, 4134-4154, 4179-4199, 4182-4202, 4184-4204, 4395-4415, 4425-4445, 4426-4446, 4429-4449, 4469-4489, 4470-4490, 4471-4491, 4472-4492, 4473-4493, 4474-4494, 4569-4589, 4571-4591, 4572-4592, 4596-4616, 4623-4643, 4721-4741, 4722-4742, 4725-4745, 4726-4746, 4766-4786, 4767-4787, 4768-4788, 4769-4789, 4770-4790, 4779-4799, 4805-4825, 4806-4826, 4807-4827, 4808-4828, 4809-4829, 4812-4832, 4813-4833, 4814-4834, 4936-4956, 5072-5092, 5073-5093, 5345-5365, 5346-5366, 5349-5369, 5350-5370, 5351-5371, 5460-5480, 5461-5481, 5463-5483, 5465-5485, 5467-5487, 5468-5488, 5469-5489, 5470-5490, 5471-5491, 5505-5525, 5506-5526, 5507-5527, 5508-5528, 5509-5529, 5511-5531, 5513-5533, 5514-5534, 5541-5561, 5544-5564, 5546-5566, 5547-5567, 5548-5568, 5550-5570, 5551-5571, 5574-5594, 5576-5596, 5614-5634, 521-541, 522-542, 523-543, 524-544, 525-545, 526-546, 527-547, 528-548, 529-549, 530-550, 531-551, 532-552, 533-553, 534-554, 535-555, 536-556, 1034-1054, 1035-1055, 1036-1056, 1037-1057, 1038-1058, 1039-1059, 1040-1060, 1041-1061, 1042-1062, 1043-1063, 1044-1064, 1045-1065, 1046-1066, 1047-1067, 1048-1068, 1049-1069, 1050-1070, 1051-1071, 1052-1072, 1053-1073, 1054-1074, 1062-1082, 1064-1084, 1065-1085, 1066-1086, 1068-1088, 1069-1089, 1070-1090, 1071-1091, 1073-1093, 1076-1096, 1077-1097, 1078-1098, 1079-1099, 1080-1100, 1081-1101, 1082-1102, 1128-1148, 1129-1149, 1130-1150, 1131-1151, 1132-1152, 1133-1153, 1134-1154, 1135-1155, 1136-1156, 1137-1157, 1138-1158, 1139-1159, 1140-1160, 1141-1161, 1142-1162, 1143-1163, 1144-1164, 1145-1165, 1146-1166, 1147-1167, 1148-1168, 975-995, 976-996, 977-997, 978-998, 979-999, 980-1000, 981-1001, 982-1002, 983-1003, 984-1004, 985-1005, 986-1006, 987-1007, 988-1008, 989-1009, 990-1010, 991-1011, 992-1012, 993-1013, 994-1014, 995-1015, 996-1016, 997-1017, 998-1018, 999-1019, 1000-1020, 1001-1021, 1002-1022, 1003-1023, 1004-1024, 1005-1025, 1006-1026, 1007-1027, 1008-1028, 1009-1029, 1010-1030, 1011-1031, 1012-1032, 1013-1033, 1014-1034, 1015-1035, 1016-1036, 1017-1037, 1018-1038, 1019-1039, 1020-1040, 1021-1041, 1022-1042, 1023-1043, 1024-1044, 1025-1045, 1026-1046, 1027-1047, 1028-1048, 1029-1049, 1030-1050, 1031-1051, 1032-1052, 1033-1053, 1034-1054, 1035-1055, 1036-1056, 1037-1057, 1038-1058, 1039-1059, 1040-1060, 1041-1061, 1042-1062, 1043-1063 and 1045-1065 of SEQ ID NO: 3, and the antisense strand comprises at least 15 contiguous nucleotides from the corresponding nucleotide sequence of SEQ ID NO: 4.

5. The dsRNA agent of any one of claims 1-3, wherein the sense strand comprises at least 15 contiguous nucleotides differing by no more than three nucleotides from any one of the nucleotide sequence of nucleotides 520-541, 520-556, 510-534, 512-536, 516-541, 516-540, 520-544, 524-547, 526-551, 529-556, 532-556, 1065-1089, 1068-1095, 1068-1094, 1075-1100, 1076-1100, 1079-1103, 1123-1147, 1127-1151, 1130-1155, 1903-1934, 1903-1930, 1914-1940, 1949-1975, 2470-2497, 2941-2965, 3275-3302, 3278-3302, 3329-3353, 3333-3357, 3338-3367, 3338-3366, 3348-3390, 3348-3388, 3351-3385, 5507-5562 and 5549-5597 of SEQ ID NO: 3, and the antisense strand comprises at least 15 contiguous nucleotides from the corresponding nucleotide sequence of SEQ ID NO: 4.

6. The dsRNA agent of any one of claims 1-3, wherein the sense strand comprises at least 15 contiguous nucleotides differing by no more than three nucleotides from any one of the nucleotide sequence of nucleotides 977-997, 980-1000, 973-993, 988-1008, 987-1007, 972-992, 979-999, 1001-1021, 976-996, 994-1014, 1002-1022, 978-998, 974-994, 520-540, 521-541, 5464-5484, 1813-1833, 2378-2398, 3242-3262, 5442-5462, 1665-1685, 524-544, 5207-5227, 4670-4690, 3420-3440, 3328-3348, 5409-5429, 5439-5459, 4527-4547, 5441-5461, 5410-5430 and 5446-5466 of SEQ ID NO: 1, and the antisense strand comprises at least 15 contiguous nucleotides from the corresponding nucleotide sequence of SEQ ID NO: 2.

7. The dsRNA agent of any one of claims 1-6, wherein the antisense strand comprises at least 15 contiguous nucleotides differing by no more than three nucleotides from any one of the antisense strand nucleotide sequences of a duplex selected from the group consisting of AD-523799.1, AD-523802.1, AD-523795.1, AD-523810.1, AD-523809.1, AD-1019331.1, AD-523801.1, AD-523823.1, AD-523798.1, AD-523816.1, AD-523824.1, AD-523800.1, AD-523796.1, AD-535094.1, AD-535094.1, AD-535095.1, AD-538647.1, AD-535922.1, AD-536317.1, AD-536911.1, AD-538626.1, AD-535864.1, AD-523561.1, AD-523565.1, AD-523562.1, AD-526914.1, AD-526394.1, AD-395452.1, AD-525343.1, AD-524274.1, AD-526956.1, AD-526986.1, AD-526296.1, AD-526988.1, AD-526957.1, AD-526993.1, AD-1397070.1, AD-1397070.2, AD-1397071.1, AD-1397071.2, AD-1397072.1, AD-1397072.2, AD-1397073.1, AD-1397073.2, AD-1397074.1, AD-1397074.2, AD-1397075.1, AD-1397075.2, AD-1397076.1, AD-1397076.2, AD-1397077.1, AD-1397077.2, AD-1397078.1, AD-1397078.2, AD-1397250.1, AD-1397251.1, AD-1397252.1, AD-1397253.1, AD-1397254.1, AD-1397255.1, AD-1397256.1, AD-1397257.1, AD-1397258.1, AD-1397259.1, AD-1397260.1, AD-1397261.1, AD-1397262.1, AD-1397263.1, AD-1397264.1, AD-1397265.1, AD-1423242.1, AD-1423243.1, AD-1423244.1, AD-1423245.1, AD-1423246.1, AD-1423247.1, AD-1423248.1, AD-1423249.1, AD-1423250.1, AD-1423251.1, AD-1423252.1, AD-1423253.1, AD-1423254.1, AD-1423255.1, AD-1423256.1, AD-1423257.1, AD-1423258.1, AD-1423259.1, AD-1423260.1, AD-1423261.1, AD-1423262.1, AD-1423263.1, AD-1423264.1, AD-1423265.1, AD-1423266.1, AD-1423267.1, AD-1423268.1, AD-1423269.1, AD-1423270.1, AD-1423271.1, AD-1423272.1, AD-1423273.1, AD-1423274.1, AD-1423275.1, AD-1423276.1, AD-1423277.1, AD-1423278.1, AD-1423279.1, AD-1423280.1, AD-1423281.1, AD-1423282.1, AD-1423283.1, AD-1423284.1, AD-1423285.1, AD-1423286.1, AD-1423287.1, AD-1423288.1, AD-1423289.1, AD-1423290.1, AD-1423291.1, AD-1423292.1, AD-1423293.1, AD-1423294.1, AD-1423295.1, AD-1423296.1, AD-1423297.1, AD-1423298.1, AD-1423299.1, AD-1423300.1, AD-1397266.1, AD-1397266.2, AD-1397267.1, AD-1423301.1, AD-1397268.1, AD-1397268.2, AD-1397269.1, AD-1423302.1, AD-1397270.1, AD-1397270.2, AD-1397271.1, AD-1397271.2, AD-1397272.1, AD-1423303.1, AD-1397273.1, AD-1423304.1, AD-1397274.1, AD-1423305.1, AD-1397275.1, AD-1423306.1, AD-1397276.1, AD-1397277.1, AD-1397277.2, AD-1397278.1, AD-1397279.1, AD-1397280.1, AD-1397281.1, AD-1397282.1, AD-1397283.1, AD-1397284.1, AD-1397285.1, AD-1397286.1, AD-1397287.1, AD-1397079.1, AD-1397079.2, AD-1397288.1, AD-1397289.1, AD-1397290.1, AD-1397080.1, AD-1397080.2, AD-1397291.1, AD-1397292.1, AD-1397293.1, AD-1397294.1, AD-1397081.1, AD-1397081.2, AD-1397295.1, AD-1397082.1, AD-1397082.2, AD-1397083.1, AD-1397083.2, AD-1397296.1, AD-1397297.1, AD-1397298.1, AD-1397299.1, AD-1397300.1, AD-1397301.1, AD-1397302.1, AD-1397084.1, AD-1397085.1, AD-1397086.1, AD-1397303.1, AD-1397087.1, AD-1397087.2, AD-1397304.1, AD-1397305.1, AD-1397306.1, AD-1397307.1, AD-1397308.1, AD-1397309.1, AD-1397310.1, AD-1397311.1, AD-1397312.1, AD-1397313.1, AD-1397314.1, AD-1397315.1, AD-1397316.1, AD-1397317.1, AD-1397318.1, AD-1397319.1, AD-1397320.1, AD-1397321.1, AD-1397322.1, AD-1397088.1, AD-1397089.1, AD-1397090.1, AD-1397091.1, AD-1397092.1, AD-1397093.1, AD-1397094.1, AD-1397095.1, AD-1397096.1, AD-1397097.1, AD-1397098.1, AD-1397099.1, AD-1397101.1, AD-1397102.1, AD-1397103.1, AD-1397104.1, AD-1397105.1, AD-1397106.1, AD-1397107.1, AD-1397108.1, AD-1397109.1, AD-1397110.1, AD-1397111.1, AD-1397112.1, AD-1397113.1, AD-1397114.1, AD-1397115.1, AD-1397116.1, AD-1397117.1, AD-1397118.1, AD-1397119.1, AD-1397120.1, AD-1397121.1, AD-1397122.1, AD-1397123.1, AD-1397124.1, AD-1397125.1, AD-1397126.1, AD-1397127.1, AD-1397128.1, AD-1397129.1, AD-1397130.1, AD-1397131.1, AD-1397132.1, AD-1397133.1, AD-1397134.1, AD-1397135.1, AD-1397136.1, AD-1397137.1, AD-1397138.1, AD-1397139.1, AD-1397140.1, AD-1397141.1, AD-1397142.1, AD-1397143.1, AD-1397144.1, AD-1397145.1, AD-1397146.1, AD-1397147.1, AD-1397148.1, AD-1397149.1, AD-1397150.1, AD-1397151.1, AD-1397152.1, AD-1397153.1, AD-1397154.1, AD-1397155.1, AD-1397156.1, AD-1397157.1, AD-1397158.1, AD-1397159.1, AD-1397160.1, AD-1397161.1, AD-1397162.1, AD-1397163.1, AD-1397164.1, AD-1397165.1, AD-1397166.1, AD-1397167.1, AD-1397168.1, AD-1397169.1, AD-1397170.1, AD-1397171.1, AD-1397172.1, AD-1397173.1, AD-1397174.1, AD-1397175.1, AD-1397176.1, AD-1397177.1, AD-1397178.1, AD-1397179.1, AD-1397180.1, AD-1397181.1, AD-1397182.1, AD-1397183.1, AD-1397184.1, AD-1397185.1, AD-1397186.1, AD-1397187.1, AD-1397188.1, AD-1397189.1, AD-1397190.1, AD-1397191.1, AD-1397192.1, AD-1397193.1, AD-1397194.1, AD-1397195.1, AD-1397196.1, AD-1397197.1, AD-1397198.1, AD-1397199.1, AD-1397200.1, AD-1397201.1, AD-1397202.1, AD-1397203.1, AD-1397204.1, AD-1397205.1, AD-1397206.1, AD-1397207.1, AD-1397208.1, AD-1397209.1, AD-1397210.1, AD-1397211.1, AD-1397212.1, AD-1397213.1, AD-1397214.1, AD-1397215.1, AD-1397216.1, AD-1397217.1, AD-1397218.1, AD-1397219.1, AD-1397220.1, AD-1397221.1, AD-1397222.1, AD-1397223.1, AD-1397224.1, AD-1397225.1, AD-1397226.1, AD-1397227.1, AD-1397228.1, AD-1397229.1, AD-1397230.1, AD-1397231.1, AD-1397232.1, AD-1397233.1, AD-1397234.1, AD-1397235.1, AD-1397236.1, AD-1397237.1, AD-1397238.1, AD-1397239.1, AD-1397240.1, AD-1397241.1, AD-1397242.1, AD-1397243.1, AD-1397244.1, AD-1397245.1, AD-1397246.1, AD-1397247.1, AD-1397248.1, AD-1397249.1, AD-523565.1, AD-1397072.3, AD-1397073.3, AD-1397076.3, AD-1397077.3, AD-1397078.3, AD-1397252.2, AD-1397257.2, AD-1397258.2, AD-1397259.2, AD-1397263.2, AD-1397264.2, AD-1397309.2, AD-64958.114, AD-393758.4, AD-1397080.3, AD-1397293.2, AD-1397294.2, AD-1397081.3, AD-1397083.3, AD-1397298.2, AD-1397299.2, AD-1397084.2, AD-1397085.2, AD-1397087.3, AD-1397306.2, AD-1397307.2, AD-1397308.2, AD-1397088.2, AD-1566238, AD-1566239, AD-1566240, AD-1566241, AD-1566242, AD-1566243, AD-1566244, AD-1566245, AD-1566246, AD-1091965, AD-1566248, AD-1566249, AD-1566250, AD-1091966, AD-1566251, AD-1566252, AD-1566253, AD-1566254, AD-1566255, AD-1566256, AD-1566257, AD-1566258, AD-1566259, AD-692906, AD-1566575, AD-1566576, AD-1566577, AD-1566580, AD-1566581, AD-1566582, AD-1566583, AD-1566584, AD-1566586, AD-1566587, AD-1566588, AD-1566590, AD-1566591, AD-1566634, AD-1566635, AD-1566638, AD-1566639, AD-1566641, AD-1566642, AD-1566643, AD-1566679, AD-1566861, AD-1567153, AD-1567154, AD-1567157, AD-1567159, AD-1567160, AD-1567161, AD-1567164, AD-1567167, AD-1567199, AD-1567202, AD-1567550, AD-1567554, AD-1567784, AD-1567896, AD-1567897, AD-1568105, AD-1568108, AD-1568109, AD-1568139, AD-1568140, AD-1568143, AD-1568144, AD-1568148, AD-1568150, AD-1568151, AD-1568152, AD-1568153, AD-1568154, AD-1568158, AD-1568161, AD-1568172, AD-1568174, AD-1568175, AD-692908, AD-1568176, AD-1569830, AD-1569832, AD-1569834, AD-1569835, AD-1569862, AD-1569872, AD-1569890 and AD-1569892.

8. The dsRNA agent of claim 1 or 2, wherein the nucleotide sequence of the sense and antisense strand comprise any one of the sense and antisense strand nucleotide sequences in any one of Tables 3-8 and 16-28.

9. The dsRNA agent of claim 1 or 2, wherein the nucleotide sequence of the sense strand comprises at least 15 contiguous nucleotides corresponding to the MAPT gene exon 10 sense strand sequence set forth in SEQ ID No.: 1533 and an antisense strand comprising a sequence complementary thereto.

10. A double stranded ribonucleic acid (dsRNA) agent for inhibiting expression of MAPT, wherein the dsRNA agent comprises a sense strand and an antisense strand forming a double stranded region,
wherein the sense strand comprises at least 15 contiguous nucleotides differing by no more than 3 nucleotides from the nucleotide sequence of SEQ ID NO: 5 and the antisense strand comprises at least 15 contiguous nucleotides differing by no more than 3 nucleotides from the nucleotide sequence of SEQ ID NO: 6.

11. A double stranded ribonucleic acid (dsRNA) agent for inhibiting expression of MAPT, wherein the dsRNA agent comprises a sense strand and an antisense strand forming a double stranded region,
wherein the antisense strand comprises a region of complementarity to an mRNA encoding Tau, and wherein the region of complementarity comprises at least 15 contiguous nucleotides differing by no more than 3 nucleotides from the nucleotide sequence of SEQ ID NO:6.

12. A double stranded ribonucleic acid (dsRNA) agent for inhibiting expression of MAPT, wherein the dsRNA agent comprises a sense strand and an antisense strand forming a double stranded region,
wherein the antisense strand comprises a region of complementarity to an mRNA encoding Tau, and wherein the region of complementarity comprises at least 15 contiguous nucleotides differing by no more than 3 nucleotides from any one of the antisense nucleotide sequences in any one of Tables 12-13.

13. The dsRNA agent of any one of claims 10-12, wherein the sense strand comprises at least 15 contiguous nucleotides differing by no more than three nucleotides from any one of the nucleotide sequence of nucleotides 1065-1085, 1195-1215, 1066-1086, 1068-1088, 705-725, 1067-1087, 4520-4540, 3341-3361, 4515-4535, 5284-5304, 5285-5305, 344-364, 5283-5303, 5354-5374, 2459-2479, 1061-1081, 706-726, 972-992, 4564-4584, 995-1015, 4546-4566, 968-988, 1127-1147, 4534-4554, 158-178, 4494-4514, 1691-1711, 3544-3564, 198-218, 979-999, 4548-4568, 4551-4571, 543-563, 715-735, 542-562, 352-372, 362-382, 4556-4576, 4547-4567, 4542-4562, 4558-4578, 4549-4569, 5074-5094, 4552-4572, 5073-5093, 5076-5096, 4550-4570 and 2753-2773 of SEQ ID NO: 5, and the antisense strand comprises at least 15 contiguous nucleotides from the corresponding nucleotide sequence of SEQ ID NO: 6.

14. The dsRNA agent of any one of claims 10-13, wherein the antisense strand comprises at least 15 contiguous nucleotides differing by no more than three nucleotides from any one of the antisense strand nucleotide sequences of a duplex selected from the group consisting of AD-393758.1, AD-393888.1, AD-393759.1, AD-393761.1, AD-393495.1, AD-393760.1, AD-396425.1, AD-395441.1, AD-396420.1, AD-397103.1, AD-397104.1, AD-393239.1, AD-397102.1, AD-397167.1, AD-394791.1, AD-393754.1, AD-393496.1, AD-393667.1, AD-396467.1, AD-393690.1, AD-396449.1, AD-393663.1, AD-393820.1, AD-396437.1, AD-393084.1, AD-396401.1, AD-394296.1, AD-395574.1, AD-393124.1, AD-393674.1, AD-396451.1, AD-396454.1, AD-393376.1, AD-393505.1, AD-393375.1, AD-393247.1, AD-393257.1, AD-396459.1, AD-396450.1, AD-396445.1, AD-396461.1, AD-396452.1, AD-396913.1, AD-396455.1, AD-396912.1, AD-396915.1, AD-396453.1 and AD-394991.1.

15. The dsRNA agent of any one of claims 1-14, wherein the sense strand, the antisense strand, or both the sense strand and the antisense strand is conjugated to one or more lipophilic moieties.

16. The dsRNA agent of claim 15, wherein the lipophilic moiety is conjugated to one or more internal positions in the double stranded region of the dsRNA agent.

17. The dsRNA agent of claim 15 or 16, wherein the lipophilic moiety is conjugated via a linker or carrier.

18. The dsRNA agent of any one of claims 15-17, wherein lipophilicity of the lipophilic moiety, measured by logKow, exceeds 0.

19. The dsRNA agent of any one of claims 1-18, wherein the hydrophobicity of the double-stranded RNA agent, measured by the unbound fraction in a plasma protein binding assay of the double-stranded RNA agent, exceeds 0.2.

20. The dsRNA agent of claim 19, wherein the plasma protein binding assay is an electrophoretic mobility shift assay using human serum albumin protein.

21. The dsRNA agent of any one of claims 1-20, wherein the dsRNA agent comprises at least one modified nucleotide.

22. The dsRNA agent of claim 21, wherein no more than five of the sense strand nucleotides and no more than five of the nucleotides of the antisense strand are unmodified nucleotides.

23. The dsRNA agent of claim 21, wherein all of the nucleotides of the sense strand and all of the nucleotides of the antisense strand are modified nucleotides.

24. The dsRNA agent of any one of claims 21-23, wherein at least one of the modified nucleotides is selected from the group consisting of a deoxy-nucleotide, a 3′-terminal deoxythymidine (dT) nucleotide, a 2′-O-methyl modified nucleotide, a 2′-fluoro modified nucleotide, a 2′-deoxy-modified nucleotide, a locked nucleotide, an unlocked nucleotide, a conformationally restricted nucleotide, a constrained ethyl nucleotide, an abasic nucleotide, a 2′-amino-modified nucleotide, a 2′-O-allyl-modified nucleotide, 2′-C-alkyl-modified nucleotide, 2′-hydroxly-modified nucleotide, a 2′-methoxyethyl modified nucleotide, a 2′-O-alkyl-modified nucleotide, a morpholino nucleotide, a phosphoramidate, a non-natural base comprising nucleotide, a tetrahydropyran modified nucleotide, a 1,5-anhydrohexitol modified nucleotide, a cyclohexenyl modified nucleotide, a nucleotide comprising a 5′-phosphorothioate group, a nucleotide comprising a 5′-methylphosphonate group, a nucleotide comprising a 5′ phosphate or 5′ phosphate mimic, a nucleotide comprising vinyl phosphonate, a nucleotide comprising adenosine-glycol nucleic acid (GNA), a nucleotide comprising thymidine-glycol nucleic acid (GNA)S-Isomer, a nucleotide comprising 2-hydroxymethyl-tetrahydrofurane-5-phosphate, a nucleotide comprising 2′-deoxythymidine-3′phosphate, a nucleotide comprising 2′-deoxyguanosine-3′-phosphate, and a terminal nucleotide linked to a cholesteryl derivative and a dodecanoic acid bisdecylamide group; and combinations thereof.

25. The dsRNA agent of claim 24, wherein the modified nucleotide is selected from the group consisting of a 2′-deoxy-2′-fluoro modified nucleotide, a 2′-deoxy-modified nucleotide, 3′-terminal deoxythymidine nucleotides (dT), a locked nucleotide, an abasic nucleotide, a 2′-amino-modified nucleotide, a 2′-alkyl-modified nucleotide, a morpholino nucleotide, a phosphoramidate, and a non-natural base comprising nucleotide.

26. The dsRNA agent of claim 24, wherein the modified nucleotide comprises a short sequence of 3′-terminal deoxythymidine nucleotides (dT).

27. The dsRNA agent of claim 24, wherein the modifications on the nucleotides are 2′-O-methyl, GNA and 2′fluoro modifications.

28. The dsRNA agent of any one of claims 1-27, further comprising at least one phosphorothioate internucleotide linkage.

29. The dsRNA agent of claim 28, wherein the dsRNA agent comprises 6-8 phosphorothioate internucleotide linkages.

30. The dsRNA agent of any one of claims 1-29, wherein each strand is no more than 30 nucleotides in length.

31. The dsRNA agent of any one of claims 1-30, wherein at least one strand comprises a 3′ overhang of at least 1 nucleotide.

32. The dsRNA agent of any one of claims 1-31, wherein at least one strand comprises a 3′ overhang of at least 2 nucleotides.

33. The dsRNA agent of any one of claims 1-32, wherein the double stranded region is 15-30 nucleotide pairs in length.

34. The dsRNA agent of claim 33, wherein the double stranded region is 17-23 nucleotide pairs in length.

35. The dsRNA agent of claim 33, wherein the double stranded region is 17-25 nucleotide pairs in length.

36. The dsRNA agent of claim 33, wherein the double stranded region is 23-27 nucleotide pairs in length.

37. The dsRNA agent of claim 33, wherein the double stranded region is 19-21 nucleotide pairs in length.

38. The dsRNA agent of claim 33, wherein the double stranded region is 21-23 nucleotide pairs in length.

39. The dsRNA agent of any one of claims 1-38, wherein each strand has 19-30 nucleotides.

40. The dsRNA agent of any one of claims 1-37, wherein each strand has 19-23 nucleotides.

41. The dsRNA agent of any one of claims 1-38, wherein each strand has 21-23 nucleotides.

42. The dsRNA agent of any one of claims 16-41, wherein one or more lipophilic moieties are conjugated to one or more internal positions on at least one strand.

43. The dsRNA agent of claim 42, wherein the one or more lipophilic moieties are conjugated to one or more internal positions on at least one strand via a linker or carrier.

44. The dsRNA agent of claim 43, wherein the internal positions include all positions except the terminal two positions from each end of the at least one strand.

45. The dsRNA agent of claim 43, wherein the internal positions include all positions except the terminal three positions from each end of the at least one strand.

46. The dsRNA agent of claim 43-45, wherein the internal positions exclude a cleavage site region of the sense strand.

47. The dsRNA agent of claim 46, wherein the internal positions include all positions except positions 9-12, counting from the 5′-end of the sense strand.

48. The dsRNA agent of claim 46, wherein the internal positions include all positions except positions 11-13, counting from the 3′-end of the sense strand.

49. The dsRNA agent of claim 43-45, wherein the internal positions exclude a cleavage site region of the antisense strand.

50. The dsRNA agent of claim 49, wherein the internal positions include all positions except positions 12-14, counting from the 5′-end of the antisense strand.

51. The dsRNA agent of claim 43-45, wherein the internal positions include all positions except positions 11-13 on the sense strand, counting from the 3′-end, and positions 12-14 on the antisense strand, counting from the 5′-end.

52. The dsRNA agent of any one of claims 16-51, wherein the one or more lipophilic moieties are conjugated to one or more of the internal positions selected from the group consisting of positions 4-8 and 13-18 on the sense strand, and positions 6-10 and 15-18 on the antisense strand, counting from the 5′end of each strand.

53. The dsRNA agent of claim 52, wherein the one or more lipophilic moieties are conjugated to one or more of the internal positions selected from the group consisting of positions 5, 6, 7, 15, and 17 on the sense strand, and positions 15 and 17 on the antisense strand, counting from the 5′-end of each strand.

54. The dsRNA agent of claim 16, wherein the internal positions in the double stranded region exclude a cleavage site region of the sense strand.

55. The dsRNA agent of any one of claims 15-54, wherein the sense strand is 21 nucleotides in length, the antisense strand is 23 nucleotides in length, and the lipophilic moiety is conjugated to position 21, position 20, position 15, position 1, position 7, position 6, or position 2 of the sense strand or position 16 of the antisense strand.

56. The dsRNA agent of claim 55, wherein the lipophilic moiety is conjugated to position 21, position 20, position 15, position 1, or position 7 of the sense strand.

57. The dsRNA agent of claim 55, wherein the lipophilic moiety is conjugated to position 21, position 20, or position 15 of the sense strand.

58. The dsRNA agent of claim 55, wherein the lipophilic moiety is conjugated to position 20 or position 15 of the sense strand.

59. The dsRNA agent of claim 55, wherein the lipophilic moiety is conjugated to position 16 of the antisense strand.

60. The dsRNA agent of any one of claims 15-59, wherein the lipophilic moiety is an aliphatic, alicyclic, or polyalicyclic compound.

61. The dsRNA agent of claim 60, wherein the lipophilic moiety is selected from the group consisting of lipid, cholesterol, retinoic acid, cholic acid, adamantane acetic acid, 1-pyrene butyric acid, dihydrotestosterone, 1,3-bis-O(hexadecyl)glycerol, geranyloxyhexyanol, hexadecylglycerol, borneol, menthol, 1,3-propanediol, heptadecyl group, palmitic acid, myristic acid, O3-(oleoyl) lithocholic acid, O3-(oleoyl)cholenic acid, dimethoxytrityl, or phenoxazine.

62. The dsRNA agent of claim 60, wherein the lipophilic moiety contains a saturated or unsaturated C4-C30 hydrocarbon chain, and an optional functional group selected from the group consisting of hydroxyl, amine, carboxylic acid, sulfonate, phosphate, thiol, azide, and alkyne.

63. The dsRNA agent of claim 62, wherein the lipophilic moiety contains a saturated or unsaturated C6-C18 hydrocarbon chain.

64. The dsRNA agent of claim 62, wherein the lipophilic moiety contains a saturated or unsaturated C16 hydrocarbon chain.

65. The dsRNA agent of claim 64, wherein the saturated or unsaturated C16 hydrocarbon chain is conjugated to position 6, counting from the 5′-end of the strand.

66. The dsRNA agent of any one of claims 15-65, wherein the lipophilic moiety is conjugated via a carrier that replaces one or more nucleotide(s) in the internal position(s) or the double stranded region.

67. The dsRNA agent of claim 66, wherein the carrier is a cyclic group selected from the group consisting of pyrrolidinyl, pyrazolinyl, pyrazolidinyl, imidazolinyl, imidazolidinyl, piperidinyl, piperazinyl, [1,3] dioxolanyl, oxazolidinyl, isoxazolidinyl, morpholinyl, thiazolidinyl, isothiazolidinyl, quinoxalinyl, pyridazinonyl, tetrahydrofuranyl, and decalinyl; or is an acyclic moiety based on a serinol backbone or a diethanolamine backbone.

68. The dsRNA agent of any one of claims 15-65, wherein the lipophilic moiety is conjugated to the double-stranded iRNA agent via a linker containing an ether, thioether, urea, carbonate, amine, amide, maleimide-thioether, disulfide, phosphodiester, sulfonamide linkage, a product of a click reaction, or carbamate.

69. The double-stranded iRNA agent of any one of claims 15-68, wherein the lipophilic moiety is conjugated to a nucleobase, sugar moiety, or internucleosidic linkage.

70. The dsRNA agent of any one of claims 15-69, wherein the lipophilic moiety or targeting ligand is conjugated via a bio-cleavable linker selected from the group consisting of DNA, RNA, disulfide, amide, funtionalized monosaccharides or oligosaccharides of galactosamine, glucosamine, glucose, galactose, mannose, and combinations thereof.

71. The dsRNA agent of any one of claims 15-70, wherein the 3′ end of the sense strand is protected via an end cap which is a cyclic group having an amine, said cyclic group being selected from the group consisting of pyrrolidinyl, pyrazolinyl, pyrazolidinyl, imidazolinyl, imidazolidinyl, piperidinyl, piperazinyl, [1,3] dioxolanyl, oxazolidinyl, isoxazolidinyl, morpholinyl, thiazolidinyl, isothiazolidinyl, quinoxalinyl, pyridazinonyl, tetrahydrofuranyl, and decalinyl.

72. The dsRNA agent of any one of claims 15-69, further comprising a targeting ligand that targets a neuronal cell.

73. The dsRNA agent of any one of claims 15-69, further comprising a targeting ligand that targets a liver cell.

74. The dsRNA agent of claim 73, wherein the targeting ligand is a GalNAc conjugate.

75. The dsRNA agent of any one of claims 1-74 further comprising
a terminal, chiral modification occurring at the first internucleotide linkage at the 3′ end of the antisense strand, having the linkage phosphorus atom in Sp configuration,
a terminal, chiral modification occurring at the first internucleotide linkage at the 5′ end of the antisense strand, having the linkage phosphorus atom in Rp configuration, and
a terminal, chiral modification occurring at the first internucleotide linkage at the 5′ end of the sense strand, having the linkage phosphorus atom in either Rp configuration or Sp configuration.

76. The dsRNA agent of any one of claims 1-74 further comprising
a terminal, chiral modification occurring at the first and second internucleotide linkages at the 3′ end of the antisense strand, having the linkage phosphorus atom in Sp configuration,
a terminal, chiral modification occurring at the first internucleotide linkage at the 5′ end of the antisense strand, having the linkage phosphorus atom in Rp configuration, and
a terminal, chiral modification occurring at the first internucleotide linkage at the 5′ end of the sense strand, having the linkage phosphorus atom in either Rp or Sp configuration.

77. The dsRNA agent of any one of claims 1-74 further comprising
a terminal, chiral modification occurring at the first, second and third internucleotide linkages at the 3′ end of the antisense strand, having the linkage phosphorus atom in Sp configuration,
a terminal, chiral modification occurring at the first internucleotide linkage at the 5′ end of the antisense strand, having the linkage phosphorus atom in Rp configuration, and
a terminal, chiral modification occurring at the first internucleotide linkage at the 5′ end of the sense strand, having the linkage phosphorus atom in either Rp or Sp configuration.

78. The dsRNA agent of any one of claims 1-74 further comprising
a terminal, chiral modification occurring at the first, and second internucleotide linkages at the 3′ end of the antisense strand, having the linkage phosphorus atom in Sp configuration,
a terminal, chiral modification occurring at the third internucleotide linkages at the 3′ end of the antisense strand, having the linkage phosphorus atom in Rp configuration,
a terminal, chiral modification occurring at the first internucleotide linkage at the 5′ end of the antisense strand, having the linkage phosphorus atom in Rp configuration, and
a terminal, chiral modification occurring at the first internucleotide linkage at the 5′ end of the sense strand, having the linkage phosphorus atom in either Rp or Sp configuration.

79. The dsRNA agent of any one of claims 1-74 further comprising
a terminal, chiral modification occurring at the first, and second internucleotide linkages at the 3′ end of the antisense strand, having the linkage phosphorus atom in Sp configuration,
a terminal, chiral modification occurring at the first, and second internucleotide linkages at the 5′ end of the antisense strand, having the linkage phosphorus atom in Rp configuration, and
a terminal, chiral modification occurring at the first internucleotide linkage at the 5′ end of the sense strand, having the linkage phosphorus atom in either Rp or Sp configuration.

80. The dsRNA agent of any one of claims 1-79, further comprising a phosphate or phosphate mimic at the 5′-end of the antisense strand.

81. The dsRNA agent of claim 80, wherein the phosphate mimic is a 5′-vinyl phosphonate (VP).

82. The dsRNA agent of any one of claims 1-79, wherein the base pair at the 1 position of the 5′-end of the antisense strand of the duplex is an AU base pair.

83. The dsRNA agent of any one of claims 1-79, wherein the sense strand has a total of 21 nucleotides and the antisense strand has a total of 23 nucleotides.

84. A cell containing the dsRNA agent of any one of claims 1-83.

85. A pharmaceutical composition for inhibiting expression of a gene encoding MAPT, comprising the dsRNA agent of any one of claims 1-83.

86. A pharmaceutical composition comprising the dsRNA agent of any one of claims 1-83 and a lipid formulation.

87. A pharmaceutical composition for selective inhibition of exon 10-containing MAPT transcripts, comprising the dsRNA agent of any one of claims 1-83.

88. The pharmaceutical composition of any one of claims 85-87, wherein dsRNA agent is in an unbuffered solution.

89. The pharmaceutical composition of claim 88, wherein the unbuffered solution is saline or water.

90. The pharmaceutical composition of any one of claims 85-87, wherein said dsRNA agent is in a buffer solution.

91. The pharmaceutical composition of claim 90, wherein the buffer solution comprises acetate, citrate, prolamine, carbonate, or phosphate or any combination thereof.

92. The pharmaceutical composition of claim 90, wherein the buffer solution is phosphate buffered saline (PBS).

93. A method of inhibiting expression of a MAPT gene in a cell, the method comprising contacting the cell with the dsRNA agent of any one of claims 1-83, or the pharmaceutical composition of any one of claims 85-92, thereby inhibiting expression of the MAPT gene in the cell.

94. A method of selective inhibition of exon 10-containing MAPT transcripts in a cell, the method comprising contacting the cell with the dsRNA agent of any one of claims 1-83, or the pharmaceutical composition of any one of claims 85-92, thereby selectively degrading exon 10-containing MAPT transcripts in the cell.

95. The method of claim 94, wherein the cell is within a subject.

96. The method of claim 95, wherein the subject is a human.

97. The method of claim 96, wherein the subject has a MAPT-associated disorder.

98. The method of claim 97, wherein the MAPT-associated disorder is a neurodegenerative disorder.

99. The method of claim 98, wherein the neurodegenerative disorder is associated with an abnormality of MAPT gene encoded protein Tau.

100. The method of claim 99, wherein the abnormality of MAPT gene encoded protein Tau results in aggregation of Tau in subject's brain.

101. The method of claim 99, wherein the neurodegenerative disorder is a familial disorder.

102. The method of claim 99, wherein the neurodegenerative disorder is a sporadic disorder.

103. The method of claim 97 wherein the disorder is selected from the group consisting of tauopathy, Alzheimer disease, frontotemporal dementia (FTD), behavioral variant frontotemporal dementia (bvFTD), nonfluent variant primary progressive aphasia (nfvPPA), primary progressive aphasia-semantic (PPA-S), primary progressive aphasia-logopenic (PPA-L), frontotemporal dementia with parkinsonism linked to chromosome 17 (FTDP-17), Pick's disease (PiD), argyrophilic grain disease (AGD), multiple system tauopathy with presenile dementia (MSTD), white matter tauopathy with globular glial inclusions (FTLD with GGIs), FTLD with MAPT mutations, neurofibrillary tangle (NFT) dementia, FTD with motor neuron disease, amyotrophic lateral sclerosis (ALS), corticobasal syndrome (CBS), corticobasal degeneration (CBD), progressive supranuclear palsy (PSP), Parkinson's disease, postencephalitic Parkinsonism, Niemann-Pick disease, Huntington disease, type 1 myotonic dystrophy, and Down syndrome (DS).

104. The method of any one of claims 93-103, wherein contacting the cell with the dsRNA agent inhibits the expression of MAPT by at least 25%.

105. The method of any one of claims 93-103, wherein inhibiting expression of MAPT decreases Tau protein level in serum of the subject by at least 25%.

106. A method of treating a subject having a disorder that would benefit from reduction in MAPT gene expression, comprising administering to the subject a therapeutically effective amount of the dsRNA agent of any one of claims 1-83, or the pharmaceutical composition of any one of claims 85-92, thereby treating the subject having the disorder that would benefit from reduction in MAPT expression.

107. A method of preventing at least one symptom in a subject having a disorder that would benefit from reduction in MAPT expression, comprising administering to the subject a prophylactically effective amount of the dsRNA agent of any one of claims 1-83, or the pharmaceutical composition of any one of claims 85-92, thereby preventing at least one symptom in the subject having the disorder that would benefit from reduction in MAPT expression.

108. The method of claim 106 or 107, wherein the disorder is associated with an abnormality of MAPT gene encoded protein Tau.

109. The method of claim 108, wherein the abnormality of MAPT gene encoded protein Tau results in aggregation of Tau in subject's brain.

110. The method of claim 108, wherein the disorder is selected from the group consisting of tauopathy, Alzheimer disease, frontotemporal dementia (FTD), behavioral variant frontotemporal dementia (bvFTD), nonfluent variant primary progressive aphasia (nfvPPA), primary progressive aphasia-semantic (PPA-S), primary progressive aphasia-logopenic (PPA-L), frontotemporal dementia with parkinsonism linked to chromosome 17 (FTDP-17), Pick's disease (PiD), argyrophilic grain disease (AGD), multiple system tauopathy with presenile dementia (MSTD), white matter tauopathy with globular glial inclusions (FTLD with GGIs), FTLD with MAPT mutations, neurofibrillary tangle (NFT) dementia, FTD with motor neuron disease, amyotrophic lateral sclerosis (ALS), corticobasal syndrome (CBS), corticobasal degeneration (CBD), progressive supranuclear palsy (PSP), Parkinson's disease, postencephalitic Parkinsonism, Niemann-Pick disease, Huntington disease, type 1 myotonic dystrophy, and Down syndrome (DS).

111. The method of any one of claims 107-110, wherein the subject is human.

112. The method of claim 111, wherein the administration of the dsRNA agent, or the pharmaceutical composition, causes a decrease in Tau aggregation in the subject's brain.

113. The method of any one of claims 106-112, wherein the dsRNA agent is administered to the subject at a dose of about 0.01 mg/kg to about 50 mg/kg.

114. The method of any one of claims 106-113, wherein the dsRNA agent is administered to the subject intrathecally.

115. The method of any one of claims 106-113, wherein the dsRNA agent is administered to the subject intracisternally.

116. The method of any one of claims 106-115, further comprising determining the level of MAPT in a sample(s) from the subject.

117. The method of claim 116, wherein the level of MAPT in the subject sample(s) is a Tau protein level in a cerebrospinal fluid sample(s).

118. The method of any one of claims 98-117, further comprising administering to the subject an additional therapeutic agent.

119. A kit comprising the dsRNA agent of any one of claims 1-83, or the pharmaceutical composition of any one of claims 85-92.

120. A vial comprising the dsRNA agent of any one of claims 1-83, or the pharmaceutical composition of any one of claims 85-92.

121. A syringe comprising the dsRNA agent of any one of claims 1-83, or the pharmaceutical composition of any one of claims 85-92.

122. An intrathecal pump comprising the dsRNA agent of any one of claims 1-83, or the pharmaceutical composition of any one of claims 85-92.
